United States Patent Application Publication US 2021/0254182 A1 - sequence listing, part 11

SEQ ID NO: 93 - DNA, 4785000 bp, Phytopthora sojae (residues 3,190,001-4,785,000 of 4,785,000)
  misc_feature (5100)..(12701): n is a, c, g, or t
  misc_feature (31089)..(31381): n is a, c, g, or t
  misc_feature (38034)..(39568): n is a, c, g, or t
  misc_feature (55412)..(59211): n is a, c, g, or t
  misc_feature (61801)..(66085): n is a, c, g, or t
  misc_feature (68521)..(96956): n is a, c, g, or t
  misc_feature (100033)..(100458): n is a, c, g, or t
  misc_feature (120210)..(120309): n is a, c, g, or t
  misc_feature (315352)..(315451): n is a, c, g, or t
  misc_feature (520040)..(525257): n is a, c, g, or t
  misc_feature (527430)..(527529): n is a, c, g, or t
  misc_feature (768241)..(768340): n is a, c, g, or t
  misc_feature (879466)..(879565): n is a, c, g, or t
  misc_feature (893446)..(893545): n is a, c, g, or t
  misc_feature (1044472)..(1044571): n is a, c, g, or t
  misc_feature (1229068)..(1229167): n is a, c, g, or t
  misc_feature (1574315)..(1593657): n is a, c, g, or t
  misc_feature (1598002)..(1614813): n is a, c, g, or t
  misc_feature (1618518)..(1618617): n is a, c, g, or t
  misc_feature (1632032)..(1632131): n is a, c, g, or t
  misc_feature (1637455)..(1646437): n is a, c, g, or t
  misc_feature (1650421)..(1651525): n is a, c, g, or t
  misc_feature (1655518)..(1665517): n is a, c, g, or t
  misc_feature (1682426)..(1682655): n is a, c, g, or t
  misc_feature (1689748)..(1695112): n is a, c, g, or t
  misc_feature (2039096)..(2039195): n is a, c, g, or t
  misc_feature (2060395)..(2069697): n is a, c, g, or t
  misc_feature (2079858)..(2079957): n is a, c, g, or t
  misc_feature (2331525)..(2331624): n is a, c, g, or t
  misc_feature (2343519)..(2349643): n is a, c, g, or t
  misc_feature (2354986)..(2361597): n is a, c, g, or t
  misc_feature (2612232)..(2612331): n is a, c, g, or t
  misc_feature (2621135)..(2621234): n is a, c, g, or t
  misc_feature (2634116)..(2634352): n is a, c, g, or t
  misc_feature (2688501)..(2700015): n is a, c, g, or t
  misc_feature (2702562)..(2703094): n is a, c, g, or t
  misc_feature (2706885)..(2707378): n is a, c, g, or t
  misc_feature (3102932)..(3103031): n is a, c, g, or t
  misc_feature (3288177)..(3288276): n is a, c, g, or t
  misc_feature (3334997)..(3335096): n is a, c, g, or t
  misc_feature (3372136)..(3374716): n is a, c, g, or t
  misc_feature (3380009)..(3398767): n is a, c, g, or t
  misc_feature (3402553)..(3407783): n is a, c, g, or t
  misc_feature (3414864)..(3415590): n is a, c, g, or t
  misc_feature (3586226)..(3586325): n is a, c, g, or t
  misc_feature (3768894)..(3768993): n is a, c, g, or t
  misc_feature (3855179)..(3857074): n is a, c, g, or t
  misc_feature (3859551)..(3859926): n is a, c, g, or t
  misc_feature (4325012)..(4325111): n is a, c, g, or t
  misc_feature (4337405)..(4340559): n is a, c, g, or t
  misc_feature (4343234)..(4347453): n is a, c, g, or t
  misc_feature (4351673)..(4351789): n is a, c, g, or t
  misc_feature (4358531)..(4360823): n is a, c, g, or t
  misc_feature (4367602)..(4413309): n is a, c, g, or t
  misc_feature (4416324)..(4440057): n is a, c, g, or t
  misc_feature (4445940)..(4446039): n is a, c, g, or t
  misc_feature (4452185)..(4452457): n is a, c, g, or t
  misc_feature (4455887)..(4456136): n is a, c, g, or t
  misc_feature (4464596)..(4466633): n is a, c, g, or t
  misc_feature (4470768)..(4470867): n is a, c, g, or t
  misc_feature (4477508)..(4535822): n is a, c, g, or t
  misc_feature (4538201)..(4541672): n is a, c, g, or t
  misc_feature (4546379)..(4555874): n is a, c, g, or t
  misc_feature (4560307)..(4561100): n is a, c, g, or t
  misc_feature (4663568)..(4663667): n is a, c, g, or t
  misc_feature (4689833)..(4690205): n is a, c, g, or t
  misc_feature (4694054)..(4704053): n is a, c, g, or t
  misc_feature (4708607)..(4708807): n is a, c, g, or t
  misc_feature (4717807)..(4720493): n is a, c, g, or t
  misc_feature (4723566)..(4723713): n is a, c, g, or t
cgtactgtatccacaatggccaaggttcgcccacattacctattgtactttgtttttgatatgttgtaccaccaacgcccgaggcgcggcgatacatgtgaatcaagcgccgccaagaagccgggcatgcagacatcgcctgcgtttgccggggacgacagtcgttgtctcgcggacggcagctggggcttcctctcgcagacttatgacgctccctctgctgcccgtcgcagctttgcggcgacggcggtcgccgcgtcgaggcgagccccgacgatttgcgcgatgccacttaggcgcgttcttaagttcccgggagctgggaccaggacgaacgggacgataccctcgtccgtcaaacctgataattgtaagcatttttaagccctaactctcgggaactaccgcgaactacggtgaaagaagaacatggtcagatagccctttcgaaacgtaacaaagtggtgcacacttggcgcgcattagtgaagaaatgaagtagctagggcgaaagtcccacgaccacgcgaaaatgatgcgagaccgggacaaaacgagctcggaaataaacctagcccgctttctgaaagccaatcaaatcgctctatttcgtcccgggactggggaccgggaacttaagaacgccccttaggccctggttcaagcacctgaacaagggccttaggcccagtcttgtatctcgcgggatgcgggatgggaccaagagctctttgttgcgggtcgaagcgggacactttagggacgacatcccctcttgtcccgctgggatgttgtgtggcgcgggtcgcgggatacatatagttgaaaggcaaatgtatcggactgcatctctaacaatctgccagggtgccggaggtcctggcaataaccgaactcgtcccaatctcgtcccgcgaatcgcgcagtcttagcttcgaggaagcgcgccaatatccactcgttcgattcaacgctttagatcgcggaaagcgggtgggtggttccccacctctacgtttggggcattgacaatatccggcgtgccggcactgcagtacaaaaggtgaccctttgctacgactcgagtgccggtgggtagcgcacggcacactaccggtatctgtagctaaaagcctaaaattcccaagaaaatagttttatgttttttagagcatcttgaccggtgttgttgcttttgtttttggtaaatcaggcggcaaagcctccggttttaacaacaaaagctccaccaaagtgcccctcgggcccccggccacacacaacaagcgattttgagctccataggctaaactgtggtgaactgcgttcttcatgcagatcatagtgtaggggaggtgttaagaccaagtagcgctactgtacagaacttacattacgagggtgctattgcgcgaacgtggcgctcagcgccttcgcccagactaatgcttgttagtgtgttggcaaatcaaaaatgagacggtttcaaacgaaaagatgcttacgaacctaagtacgaatcgcgatttaaccgcatcaatcgaaagcggcgtgccttgtgctattgaacgctccaaaaggttaagaactggcggagtgacattggtctagaaaaattatctccattttcggaccccctaaattcccgattttttttggggtgtgtgacctcaatattttttcaattttaacgtatcgtatattatcggaaagctcgcgctaaaagcaatcgaataagagtgtttttacgctttttacgtgtgcttttaactttcgaaatgttggtgtccggttatttccgaaaaatgattgattatctcgagaactctaaatggtgcctaaacatcatttcgtttgaaaccgtctcaaatgatctcctttggcgctttgactccatcaaaaactccagcaattatgtcagagtttttttcaagttggtaagaatttgttgacacggtgttgaactcattgaactttttctggtattttcattttaacaaaattgccaaacaaattgttgaccggtagagatgctttcagagaattcccaatgttggcaaataatatcaatttctatttttcaaaacacgtccgtttacctatttaaaccgatttgatactcaacactcaatagaaacgtcatatcaagttcgacatggctacagaaataaaattcataaaaactcaaaattttatcgcgctaaaatatttatgttttcccgtcaattttcccaaccgtgtttaagcaaaccaaataaaaaaattaaagaatattagcttagaatcgtaaatatagattagttgtcaagtaaacatgaccaaaacaaaaccgcaccaaaaatatattagctgaacatacaaacattaagatatctgaatcgtcgagtactataacggggtgcaatcaagtgtattcgttacatggtgcccctgcaagccagccatcgtttttaaagtccatcgtagctcacgtgagccaccgaggatttaggtagaccaatctacccgagggcgtaagattgattacaagtgctatcaagtgtgacggggtcacacagcaccttgcacagaggaagtgcttcaagatattactatccaggtgaagagttgttcaccagttgggaacggtatgctacaaacgagtaggttatatcactggcagatataaacttgccccaatacaaactacaaggtgactatactaaagcccacacagtcgcctccacgaacaagagagggcacgaaagactcagggagacagatactagcatcagcacctgtgagtcgttctcaatgaggctgtccgcgccggaaggagcacgccctgtaagatgtctatttcacgtcttgagcggtgtgagccggacgcttatcaacatgaaacgcagcggcttcaagtgcactgacgacgacccgttgttgctgctgcgagctgaccagaccaaccacgaggcgtccatggcttacttgctcgccggaaactccgctcaccccccaacgcaccagatcaccttccacgatcaggcgaagcagcgccggctaagcgccaacgtcttactattttcgcaagtcgaagatctggtatgccaacatcttgtaagttgtatgtaggaccttaccctgatctcggcacaagaggcaatcatgtgggaaaagttatagctgtaacagggttgcacccacaagtggctacaactacttgtacgtctaacagttacgatatctggtagaggcttggatacttcctcgagcttggtgtacgaaacatcaacgactacatatatttacgaccaccacaacggatagtgcgtacactttgaatttctattggctgagaacagcattctcttagccaaattaagttaggcttcctcctacacgtgcgtacacatgtaagccgttgcagtaaaccacagtagttctactacaatagctgcgcattgttgggcacatgcgggcaagaatagccccaaataagtattcacaccaccacgctgctctgggtttaagccaatccaatgaaacgaggcaataattatggttaatttgggtatcagtacacctttaatacagcatgttcacgtgtcaaaggtcggctaacgggtaattccaaatagtatacagtacatgtatactattgaaatacctttaaatactacaagatactctatttggtagaatatactatgtattcagttgcattgatctaaccttcaaatatttaaaattcgatgttattcgtaatgttttgtcaaaatatcaatcttctttttgttagaagtgggcagtaataggcggttggattggctaaaactacgcttcaattttaaaagaattacccaaggtcttaaaatggtaatctaactgctgatcttgttttctgtgaagtacggcaatttcaaaatttatgcaagtagttttatgtacagttattatggtataataagtattgtgctcaccacgcattttggccgcccggatattacccgttctcaagggatttgagctcaccaaatcgtggtcgatatatatatatatataaatcccttggaacgcacacggtagtgtgggcattttgttcgatttgtttatatatcgccaagcgctcgactaaacaaccaatcaccagctttagcccaccctgcatgcgtgtggcgcagctaaatacccccagctggttgatgtgagaacctaacctgctcggggtaataaggagtaaggaggtatacatataattattcggggtatatagagcataaatctcctaatctcggtcgatttagcattggaaataggcaaaatgcgtggtgatcacaataaatgtcgtgtgatatccatatatcagcattttcacaaatttcacgctgaaatggtatacattctgtacggtatactacagttttccctcccgcaaatgattatcatcggaggattcaacaacttgatcgattattattttagccaatttatcaggttaggtagccacttgatgacatattttcgaccaatcacgttgaatcatgaactgttcatgttaacaagaggttcgagactctgctgacggtttcccggtaggtccctcctgaaccgaatcctgcgccaataagtttaagattgcacaagtagcactaacgtggaaccttcatctaaatcgaagacgtaggctatctggagacgatccattctttagtttgcgagctatagcctgaaactcccttgcgcaaaatcactaacatccccaacctacccgggtggttagtaaaccttcagctatattacgaaccctttgttaacacattttaacacgttaatcagggctcggcaaaatcttggtcctcagatctgagggggtgggtttggcaacatatgtggatgggtgggtttgggtgatggggttttgaggctcttatgacgtcatcactctaatgtcccgccacagccgagaacggtatgcagccgagctagtaaagagcgttgtagagattctgagcatactaaaatgctaagagtctaaactgcggttccgttgagcccgcatctttctctcacatgctttgccgggactaaagccacgctgttagcatatcaaacttagtatggtgtccgaccactcagttttcaatttgaacacttacaagcacctctcccgcgacctcgccccccccccaccccacccttcctccgttcgtcatgagcttcgcttcgcagatcgacctggtttcctacccctccccaccaagtggttctctccctcaagatggcccgaccgcatccctgctgcctcaagatcccgatggcgccgacggcactggcatctcttccgccgcatctgcaccgtcagattgggggcggcggcggcttacgtcgctgcctcaggcaaccccgagtcctgctaaacgtggaaggcgcgaggatcccgtctgggatgatgccgctgtcgccgtcgatgtcatgttcttcaaaaaatgcgggaagatcatccacccgctggaagcgacgcatgtcgagcctgtttgcgatcgcttcaagagaaagtgtgccaagcctcctgtgacaaggcccatcaccgaatgtttccagctggccctcgtcccttcgaagctaatgtcgctacaacgtcaattcgcgttgtggttctactccaccgggatggccttcaacaagccaaccacgaaacgttaactcaggcgttgatgatcctgaatctgggtgccgtccttaaaacagtccgagagcttgcgacaacactcctggatggtttgtatggggagttaaagttggtgatcgtccgccatgtccagggcaagaagtgtacgctggcaaccgatgcgtgaaccgacatcaacggaaagagcgtcatcaactacatattggtatgtggggagggagcctaccttctggagaccgtatacacgggttcgatctcgcaacagcgccagcgttctcgcagctgacatcaagcgattcgttgaagctacgatgtatgcagccgttgcggctgtcgttacggacaacacggccacgaaccagctggttttggcatattattgcagaaggactacccacacatgttcttccacggctgtatttcacatatcatccacttgatcgtcaaggatcttgtcgcgagattgccacggctcaagacgctccaggaagactgtcgcaagctcgtccggttcttcaagaagaacgagctgctatgcacggagctaccccgcctacagcagcttaaaggcaaaagctgcctgcggatacgcgttgggggacaatctcgagaagtgtttcgtctcggtgttggagtctgagttgattctgcacgcctttgtgagtgaccgggacttccttaaggcgatgacgaaggagcagaaggcgaagagaataatgggattcgacgtcgtacgagcgaaggactttgtagcgcaactgctcaaagggaccaatctcctcggtgttctttcccgtttccagaaggtgttcgagagaaacactcgccccatctccgacgtttacaagatgttcctcgacttaccgcaaacgctcaaggagatactgaagtccatctcggagttcggagttatcacggcctttcttcgggaacgcttcaacttcgtctgccgtgacgctcacggtgtgtcgtatcttaaggcccccgatatgtgggaaacaccatggaccacgggacccgcgagagtgccgaggagttcaacgccaagtggaacggctcggacttggaggacgcgaccatgatcgagttgattaagtttcaagctgccacacaacaacctacgtgccagattaagctggtacaggacaaatggatcggggcccgcgaggtttggtgcggcacccacggctttcctctcctacaaaagatcgcaaccactgtgttcacgcaacgtttcggtgcacaagctcgtccactcgcaattgcgcaaccgccacaaagaggcaagtgtcgcgaagctggtgttcatcttctttaatatgaagaatcttacttggaagacttggagctgccgaatctggtggaggaactcgctgagcccgacggtgaaagtagcagcagcaacaaccaagacagcgactttgagtattattaagtaataacggaaatttccgaataataccccgggtactatttattagtaccccccccctattttcaaaagaaatacttctccggtccggaaaagaattaacagttaggtttttttcacaaaaaacctcaaaccatctcgatgtatgattggtcgaagtacccagctatgcctctatgtaccacacttcattggacaaaactctaacatcagtgatttgtatgcaaaaaacctcaaacacgattggctctgtttctggccttggaatattgaactttttacgacattatatcacaggaataagctctctttccgctttctcatgtgtatttccaagttctaatctgatcatttttgatggcgcagcgaatttaaacctcagacctgtggaaactgattgtttaaacggcccgataactaccttaaagggcgggaaaatggatttatcaaaaatactacgtgatacaccggatccagagcttaaatttaagggtagctacagctctcttggagtagtagaacgcaagatatagtctgatcagaggactgttaattctttagcggaccggagaagtatgctaaattatggatattacacagtatttcatacataaacatgctttcgacaataaatttataaagatatacttgatctttgtatgtaagtatcattgtaaccctgggatacacattgggttacgttttagagggtactatacgggtaaggggtattattcgggaatttacgttaatacaagtctgagtttttgtgaacattgacttctattttatagttagttgcctttgctatatgatggccgcttatctctcagcttggaccttgtccactttgccgcttagccaaatcggtgaccactttgaaagcaaaatgagtgaccactttgacgattagccaatcaaggaccaccctggcccttagccaaatctgggaccgctttggcgtttatccaaatcagcgaccattctggcgagccaattgtgaacatgaggtttatcttatgctttgcgctgatgcaaagtgatggccatcctggtctgcctcctgcttacgtcttatcggatatgaaatctagtacagacgtccggtatagtatctaccagcaggtctggaccgcgtctggcgaccccatcgccaaaacccgagcgtaaacgcgacgaatctgaaacgtatctccccccaggtcggtcctgcaataattaatatttaacaaaaacgcatactagcgggagagccggtcgcctggtagaaaggcctccccctcttctcgttcaaccagtgcctggaaaaaatatattataacaaatagtaatgatattttcttacctcatttatttattattgctatattaaagtaccctgtattaatgatactgagcgtcatttattttttgtatggcatagttagttcttcatgttttgaacgcattgtgcacaaacatcttgtttttattaatagtaatagtgagatctagtgtttttctggggcccatcttgtccagtgattctagaagcgtctcccgtcgactacagctttattctgctcattcaacaactgaagacatcctccccagcccccccttcccctctccgtttgaagccaagcccaagaactccgacgtctgccgcgctttcttctcctccatgcctgacttctacttcaagtgcaagtactgtggcgcggtacgccgccagaatgtttcgcgtggctacggcaatctcgtcagccacttgaaagacaagcaccccggctacgaggctgattatctcgcccaggccagctccatgaccgggaacctacactcctacggcttcgtgagcgacaaagtcgcgaacgtgtaccactggctggagtgggtggttgaccgcaacatgccgctgtctgaggtggaccacccgctcacgcgttcgatgtcgcgtctcaagcccatctcctccaagacgctgagaaagtacctcgctgccacgaccaaggctgtcgagaaggccatcgcttcggtgatgccgcccgactttggcgtcatgttccacgggtggacgtgctttggagagcattacgtcgctgttatcgccgtcttttggcttaacggcgaggtgcactacgtggtgttggctgtagcccctctcgacgaggccgaccaaacggcagagtcatactgtgctttcactcggaacattttgggtagttttggcctatcagtggaggcgctgaagtttctgtgtggcgacaactgcgccaccaatcagcgaacggctacgcttctcggcgttccattggtgggttgtgcttcccatcgcttcaatctggcgacaaaaaagttttttgccgagcacgacgacctggttggagcggtgagcgagctgatggcggcgctgcgcaccccaagaaccgcgccgagcttagacgacacacgggtctggcgccgctgagggcgaacgcaacgcggtggagctcgacgttcacgatgctggaacggtacgtgctcatccgcgatgagatcaagcgcgtggacgccatgtacgacctggtgccaaagtcagctgcgcatcgccggattgtcgcgctgacggagacactcaagacgttcaatagcgtatgcaagaagctccaggaagacaccctcagcatgagcgccgtgcgcgtcctcttcgacaagatggcggagatgttccccattacaagttcgtacctgtcaccggatgccagcatcattcactctccggtgtttgagagagctgtcgtaaaggtaatcatgttgcgggtgttttgctaatgttgcgcttaatactaatattgctgtatgttacactagattgctgggaagtgcgaagccgagctgacgccagaagaactggacgcggtggctccgtttgagctcagctctgcggcgaacgtacccgccgccagcacgcagcagcgcgcgcgcacgcggacccaagcacgcagcggtcccgaagacttcgcaaccgcgctgctgcgctccgacgatgtccctgcggaagctgggccacgctacagccctctcgtcagggcaattccaccgaccagtaaccgctgcgagagactcttctcgcagtgcaaacttgtgatgacgccgcagcgctcgtctctcctccctatcaactttgagatgatcgagtttttgcgtgcaaaccgtaagtactgggatgcccacactctaatgggcattgaagttgctgatgctgatgattagttgcggtaatggcagctttagctcaataaaatacctattgagcagttctttattattgctatgcgctttcaccatttatttaatattgttgtaggactttgggcatccattactttattgtaatgtccgagcactgcgttcaaccatacagcattttggtatcgccttcacggacgctgtgcccatgtcgggagccctaccggctgatgaggccaatgccaacgagctgcagcaagctgtggtaaacgtgatgacccgacgcgctagcacaagaccacacaattcgacaaagcagtacaagaacaagcaggacaacttgagcaggtggtgcactgacaggaacttctttgatgggtcactggtgtacgagtcgaagctagtagactatatcgataattttgtggtaccccgaggaaaccagcgaatgaaaaacgctgacggaagcgccgttcggctagggtatgaagccgtggacgcttatggcaaggctataatcgatttacatccgtttcaaaagtctattggtatgcatcagcactcccacacgcgtggcaaagccctaaaaggcttaatggacatgctgaagtgaacatggatatatacgctgaccgcgatttaggaacaatgttggacggctacaacctgaaagatatgcgagcgctaagccaattctggctcaatcagcctacaggggttgctttacgaggtcgagtggactttttaattggacacgctcttctagttcgtggagaatcgcgagaatttattcagtttccggatattctgtcactacagttaaccgacgaaggccctcaagtatgcagccctctcgtggttattatgagaaaaggcaaatcaaatcaagtcgggcgggtagaatatgaagctgcgatgcgatgcaaagatgtgatgttgtgcccgttaaatgctgtggcagtgtacctgttttggcggtagcatgtgtagttggagccctctactagctttacgaactgaacgccttggtgtaacatccatttgctgaaaggttaatgtgcaacacgtgatattgcctacaacacgcaactagagcgcgtgacgagtgcgctcatagcctgtggtatcgattcatcggtttggatacacgccaaccgcgtttctggcgctaagttggctgaactacaaggtgcggatcaaacccagattagacgggctggtagatagaattgagaacgaatagaggcatgccacctggctacacttcctcgaaaaggtatgcgtgctttggctggtttccctacaaaagagggctgctgttggatcaatcgggccacaatcacaccatcaccagatctccagaaagtggttttccctgatttagactccgctgaagacgtccttctgaaaacgggaaaccaagaggtagcggcaggcagatttatagggttgctacacatgttaagagttgtttttctccaaagactcggtactactacgtcgaaagttcctcgagcatcgcctgtggagagacccgctttttagtacagaagagaacgggaagtttgaaacagagggcacgatagctttgcaatcgactacgcagtctcaacacacacgtatcgaagctgtaattccgttatttgcatcaacaatgaaagatggattccaggcacttcacgtgaaaattgatagtctcgatagtgaagtacggcagctgagagaacaaggattcttttcgcgaacaagaaacgcgtaatcgcattagcagatgacgttgatgctccccagcgacgtggtgttgtcgacgctcgtgggacattgggtcccagacagtcggtgagtgttcaacaagatctggcttgcatttaaatcgctcgccgcagacagtggacgaagtctggactgaatatactcgtagaacagctggtcaaatctctgtctgtgaggctgagcaacgatttagaagaagtagcgaaaagatcggacagagaagcggttcttctcacatcgtaaggtattttacggtgcgacccaggcattcgtggcaatacatcagataactgaaggggcagccactggggagccggagaaaaagcgcaaatagacgggagaatctctcgatcgattcggaaagatcgtatgaagtgtcgttcagagttcacaaagcaagtaacagctcctcactcattgtagcacagatacgtatacacgtcgtattgtagtataacaaaccctatttgcagtataactcgacctccttgcagtatacctcgacctccttgcagattaagtcggccttcgggtagattaagtcgaccttcgtgcagattaagtcgatctacttgcagataaagtcaacaatcgtactttataggctcactggcttaatattttggtcaaccgattgtaaaaaaacacgaaatctacaccgttcactttgactcccctcattagaaaaagacaccatcctcgcgcacaatggggaaggagagacggggccttaagcaagtgcctactgccacgaaggccagcaagctcaaggagtcgagagataactctaaatggaccgtgaaggtggctgcaaagcggcttgatgtagcgaaggggaggttgatgggctggatgaaggcgctctggtatttgcttgacaatccttctgttgtggaagctcttggagacgcatttcgcaagaagggggctggcaagaagaagcgacttaagccctacgagctacgcgctcttaagttctatgattcgtgtcacgagaatgttccggataaagtgactgatagctttgactggaccgttagtggacggctcgatggatcgtccaaaccgacagatgctgaaagtgcgcactattatcggggtgtcttatctcgtacgaagattggatgtacttggtaccattggttaacaccaacatgaactacgcaccggtggcctttattgccaatagagccccgattcaagtttggttggtttaccctgcccgtcgtcaacgtatcaacttcacttacttggccaggaaccacatgaagcgtcaaaatcagcgcgtcgagcaaccactaacgaccaagtattgacggtatacatcgagctattatttacaagcatgggaagatcgcgccgctaaacaaaagaaggaccaggggtggccaactggtcactttttatcagggtgattacgtgctacgtgctgcgatcacgtgtcgatgagcgcctccataacaggtgatatgggtagcccgtacgttgtctcccgcaacgactcgcactcgtttcgcgtgcgacacctcgtcatcagtaatggagaagatgtacacgcctctcatcttacgtcctatgctgacagtaacttcgaggttacagacaagcttctgaagtatgttgctgcgcagagtattaccttaaaagttgctagacttaccgattgtgacgaggcgatgcggggttttctcccagaaaacagttataggccctccttgacagacctcaggctactacagctttggatccgtctcggctggcacagggtgtgtgttgtccagtacacgctgttggtcaggcacacgatgtgtatcccttgggtagcggttcttttcaccaggaggttagtatcgaccccgtgaatcagacagctacgccgggctaacgctggaacaatccaacccgaatagagttatacacgttatacaatcacacaaatacttctttgccctctcttctttctctaggcccaaggctaaggccaaaatacaagtcaactggtccaaatccaagacacttgatcaatcttggggacgcgcaccacctctcggagagaggaaacgatctaccctgtcgccaacttcttcagttcgacacaggcccaatagaccgcaaatatacaacaaagacggtctgcaatccgccaaatatacagatatggaatagatatgatcacctccaggccgaagcagtggatcacttacctaaagtactttgaattttgtcgtggagaacggccttccaggctgtgaaagaagcacttgtgcccttcgaagcaaaacgaactctgtttggttaaaggtcacatgcagacgaaatctttcctaagcgactcctcggagactgcgatctttcggcggagtgttggtctgaccttgaagggtcgccagactggataccttctcggagttgttgggtacacctcggatcttggaagatgccatagtgaaaccaagtgttcttgggtttggagtcttgaaacgcctcgcacagaggctgttcttgggcttttgtgggaagtaagtctgaggacacgaacgttgggagtcgttattctgggaaagcaacggggaatctgagaagtgcctcagttctcaggtcgtaacccagagtcgagtcccgcctcgcgcagattcgtagggaagatcgcacacattcctgtgcacttctaggaacgtgatccattcgcctacgccgacctgctttccggggtctcacgtccgccacaaacatactcttgtttttattcggctccaagtccagcacgaactctcagaatcccaggcacgattgtcgggttccaagaatgtaccacttatctggtaccgtggtcatcattcttgaccaacacatttccaccaatccgcgaactccacaatatgggcaattcccgggttttggtcccatgacccaaattttagtgacggaaccgcgtaacaaccgccccaatggccaatttgacccacagatgcaacttcaatgccgagatgggtcgaattgcccaaaacgcagacccaaatctgggcgaccttgtcgccacgcgtgtcgcacgagatccgggaagagcgtcgttcgagatcattctcgaaagaccaagcatccagcatcttcaagagcagcgcggaacccgcatggcatcgccgcccgctgccgctgaaccgtccaaggccgcgcgtgcgccaccagctaacccggggcaagccacaggaagcagcggcgacgacggccaacaagaccaaggcgcctctcgaagcgacgaacacgggcagcctgagcaacgagtcccacctgccgccgagccgatgtccgaggcgtccggcgatggccaactcctcacggacgggagggcctcacacgagggcgtagcggtaccggcgcgagctgctgtaagcgaaggtcaactcctcgcggatacgggggcctcacacgtgggcgtagtgttgagcgctgccctcgcgagagcatcgacggccagcgccagcatcccgagcagccagtaagggtcgcagcagccggcagacccgacgccagcttcgagctctagcgtccgtggtcgtagtggtgacgggggatgccgagtctcacagtcaacagcagcttctgcgcgcagactccagtccgcggcaacatcgtttgcacgctcgtcttccgtgcccccgcgcgtgcgtctcgtcacaccgcgctacgtcttcagtgagcacggagttcctgtgtcgcggcccgcgttggtgggggtgccagctacactggcggacatcgctgctgacgcacccgtccgagatggcgtcgaaggcgggtgtttgtcggatcgagacttcgccgatctggcgcgaatcatacgcgaggacgtgcgcgccaacacattgcagcctgttctgaccatgccgctgccacaagcagcctctctggcagcttcaggcgcgcaggttctgcgcgaggcgcttcccgcacttcgttacttcggtgtggaacatttcgcgggtcacacactggcctcgccgcgttaccttcacttgcttcttgcgcacattcgggccctggagcaactcgtccaagatccgcaagtcgcggacacggcagcatggttgacggagtgtcgtcgcctgagccacgagctccagaaccagcgggcattttggtccgagcgcgtcaaagttgaacgtcggcgcggcattgcagctcacgaacgcttcgttgacgagagcaagcgtcatcatgcgtttgaagtccaagaacgagatcggcgcatcgaggagctgacgacgcgccttcgcgcaagcgaagaaatagcacaccaagccgaggcagcaagtggcttgcttgagactcgactacggaattcccggctttcagacccttggtccttaatggacttcgtgcgtgagcacggccgcctgcggggcaattggctacgcttgcttgcttgctttgcatgagcattaccagacgggcacagccccgcctccagattgggtgacgcgtgtgaacgtagaggacttgcgggcgttcgacttcaacgcgcctccgtatccatcagccacggaacgggccgcgcagtccgataatgcagtggaaaagcaaagccgtggagattgtgaggcgctggaggaggctgaatccgagaccaaggctccagcaccaacctcggtgctgttccaagtcacttctgaggagcttcaacgcgtgacctctcctcatcgagactcagcccgttaattggacttgtctagaggctgccaccgcgtagtcacagttgggcaacctcccattcctgagaagaagacgcccacgcccagcgccaaatccaaatcgccgtccaagcctgcacgtaatccgaagccagctgccaaagcccggtctgggtccgcagaggagtctagcgagagctcacactcggtggtggacttgacacacccgagcctgcaacaatgcagcctctgtctcagcctcaagctcggcctagcgactactcgggaagttccagaggtgcacgttcacgcaacgccaagtatgtcgtaagtgtagaacgagctaccgcctctctgccgtcgacagtgacatggagtgaagtgcgcgccgacgtcaaggagctcacgctcttcgggacgtcgtacttggactcgctggcgtttgcgcggatgaacactgcgttgcatacgcagttccggcaaaaggagctaatgccgatgctggaatcaatggcgtactggaaccggatggattccacgccgtgggttcgcaatgtcccagagtgcttcttggaccaagctgtgcagaacctctcccggcgtacgagtgcgcctccattctggcctgacttgccgtccgagagcttgtctccttccgagtccctgtctccacttccaggcaactcagacagggatgatggcagcaacaccttccagtcggacttctcatctctctcctcgcatggtgacacgggggatgaagactactcggcccggaaacgcaaggattcaggccaaagtggtgggtcctccaaaaggtccaagcctccggctaaggcgcggcccagctcagtgtcaacgcaagacctggtggttgtcaaagtcccagcctcgaagtaccggctgtacaagaaggcgctgaaagacatgacgccccaagagaaggacatcatcgagattccggaccccaccgacaaaagctggcgttacttcgggattctggtccagaagcagccgctgaccaaccaggtccctcagaatctgggatttcccagcttcgtgccagtcaagactcatatggacgagatcaaaacacgttgggaccgagccaaatacgagaagctactccaagctgaaccctgggctgccatgacaagcgcgtcaaggtcttctactttcacttgcgccaacagctccaactggatttccttcacgggattgctcgcttcatcgggtggatgcgcaaagccgctcggctctactgggaaggcggacattgggtcacaattgacgaatccgaaccccaatcccgaggccttcataccgaccgcaaagtgcgtcgctcccagtttcgcaaagacctggacgaacaagtggcactcttggaagccacagaaggattcgtgccgacaatttggtgggaacctggtatctgggtggctgcccttggatctggcgcgacttggagcacgagccggacgtgttcaagcagcttgctgctttggacgaagacgaacccatcagaacccagtgggcggcgcgacgcaacgacgacgccttcctgcgtctcaccccagtcgaacttcgcgcagacatgctgaatcccacgcagcgccgccagaacccgttacctctgccgccagcctgagtacgagcgcgagcagacccttcttgttgtagtttgcatgtcatagcacctcagagtacaacttagtaagccccatgggtccccgcagcgaggtgcaacaagttccacgtaattctccacaatacctccattccctcgatcaattaccccatctgctttgccacatcacttctccgaatatcaattgtcgttctgcgaccagtttgtttttgattggtgggtcgggtcatcatagcgatagacttatacatacgcaataaacacatcgagtgccagaatcccagaattattgggaatctgtcacagcgtctgagtcatcacctgcttgcattgcccgaaatcgagctcgcgctctagcgcctttgttaaattcgtaaagcaggttaccacaaattagctgcgttgttgagagccattccaggtccgagtaccccttccatttcacgaggtactcgcggactctttgagatgtcctggtcctctttgtccagcggatgtccttgatagcttctacctcgtacacaccagattgctcttcagggtcccagctgtcttccggtaataatgctgcatcgaagtcatcttcttctgcaacttcgatctccactgttgggcgttctgggaagagtgctcttggcttcaatctgctgatatgtacccagggaccaattcgatagccggtgccttcgatctttagccgtacgcgaaaatcatcccggacttcttcaattcgaaagggaccatgccacatgtgggcaaacttcttggtcaacccgggttgcacgcgagccagatacagccagacagagtctccaagttggaagccggctttgagtctttccgagagttcctgccatttctgagtctgggcttctgagcgcagccgtttagcttgcttctgcaagtctcgagcccaagcatgggcgaaactataatcgcgttgcagcttgcgtctccactcgtaagccgacttctgttccaaccccgtgggtggtggacctaacatagccgacacagtgctcttcgcatcccaaccatggaccagataaaagggcgtttcgagccgggtcgaatcgaaggaggtgtttaaggcgaacaccaacttctccgcatgatcttcctagtcgctctgatctgcctccgctacataggcccggatgctcctcaccatagtctgcaccgatctttcttgttgcccattggcttgagggcgatacgccaacatcgctcgctgtttggtgcccagcattttcctgaatcgaccgaaaacttcgctcataaatctggggtcctggtcgtgcctgagcatggagctcgcaccgaagcgccggaagacagcctcttcataagattcagctacgtcttgtgctgtcgtcgaactcatgggcttacacatcacgaaacccgagaacatatcttgaaaaagcaagagaaatgtattccctcgttcggatttcgggaggtgcgtgacaaagtccatcgacagcacatcgaacggagcgttgggctcaatattcccaggcgatggcccgggattaggtggcttcccctttccagaggcgcagtccacacactccttgacaaaacgttcaacatcagcgtagaggcctgaccaaaagaactctcgacgcaggcgttcgtgcgtccgcgtaattccttggtgaccgtcttgaagctcttcgtgacagtgatgcagcaagtcctggcgcagatcgtgaggaaccactaatcgaggttcatctcgtgcatctcttggcctagaagcagtcgatcggctcagacagtaaagaacgtctcgggaatccaagacataattgtcagcaatcttcaccatcctctgtgcttccagttcagagagttcagagagatcacctcgcaggaaagctttcaactgtcgcatccatgggtcgccatcttggtgagccttaatgcggcgccagcgctctgcttggaactccaaaggtgtcatgcctggggtatcagactccgtctcctctgcatcacgaacttccgcttgggcttggctccgggtcagagcggctagcacgcgcgcggcaagagaaagtggtgcgttgtcataatctgggaactcatctacgactgctctcagtactcgacgctcagcagtgccttcgaccaactccagattcagactgtttcaccagcttctcagggatgcgattcaccaaacgcaaatgcgacagctcaaggggatcatcgataaccagtgattctccagcggctagagtccgactcgtgaaatagtccgcagcctggttgaattcccgcttcacatgaatcaacttcacagactggaacttctgacgaaccgaatcgaactcacttaacaggcgctgaaggttcggttgatgacagttgatcaacccttgggcctgttgaatagcgattcgggagtcaccgacgacaaccaagtcgtaaacaccatgctccatagccagtgtcgctcctttgatcaagccatgatactctgcatcattgaccgtcacatcttccagggcgtaacctcgcacgctgaccacagtccactctgggagcttccacaagatacaaccacagctaccttgcctggtagacgtcttcgcagcgccatcaaaactgagcaggaaacctgagaaatccacttccaacatctccagactaatcggtggggcaggtgtcactcgtcctttcctcggaatcagggattctgccactttatcgagatgttcacgaggcgtaatcccagcgcccatgatggctgccaggccatcctcgtccctctcaatccggtgaatttctagatcccaaggcgagagcagggtggcccagcgttgacaacgtccctccaatgatgacgaagtgaaaatccaccgcaggactgagtaacgagtgtagaccttgatgtgactcccagcaagcatacaatgaaacactcgcaggacgcgcaacaacgccaccagccggatgatacttaatctcagactcattgagggttttgccagtgtaccgaacaggaaaaatcacaccgtcatattcttggcccaagacagcacttgcagcccaaggattcgcatgcaggatcacaacaaagtccttctctcgctccgggtgtcgtaacagcggcgtcgagacgatcttcttcttcagaatctcgaaagcctctttggcgcgccccaagtcgcatccttcccggacttgctcctcggtcagctcgtaaagcaccgatgctataacaggaagatcctcgataaacttgttgtagtagttgatgcttcccagaaatgactgcacgcctttgagtgtcgacggaaatggcaaatcattcacaaccttcgcgatcttgggtttcgctcgcaagccttcggcgctgatttcatgcgacaggtacggaatagacagcttcccgaactcgctcttgggcaggctcacggagattccccagtagcgtagtcgtaacagcaacgcgttcaggtccgagcagagctggtcccaggtaggcgccccatgggcgatgtcgtcaatgtatgagcttctacccaggactgggcccattgaaactggggctggaatgttccggtggaaaacagtcattgcatctgtcagagctgggatctccactccagaatcggggaccgctcgctcgtctaccttaattcccagaaactcaagcacatcgggatcgaccttggcttctccctcagacgacagtcgcacaaaaccccaaagacagttgttcagcatctgctggtatatcagggtgcatttttcaacccgaaggccatgcgcaaccattggtagtgtccaagaggacagacaaaagcagaaatgagctttgccctctgggtcatgggcaccgcccagaagccactcgccatatccaaccacatcgcagcttcaaatccaatcagcaagtcatctatcaacggtagcgggtagcaagacagcttgatgagctggttcaccatccggtagtcgatacaaagtctgatatccctgccgttcttcttcaaaatgattacgataggtgaggcccacttcgaatgcgaagtctcgatgagtccggtctccaacaattttttgatcagctcgtagacttggtggaggaagcgtggagcaatcggacgagcgcgctgggcaatgggttttgcgtccccaacatccaggtcgcagacaactcctctggcaggtgcgggtacagcagtgccatctcctaggaagaccgagtgatgatattccaagatacctatcatctccttgttcatctcaggagtggtcttgccttcgacacccacatcagcttcatccatgttcaccttcgggctgagatccttcaagtctgggagtacagccaactggtctcgtaactgcgtcaacagctcggttccttcatggaagaagacttcttcatcaggatccaagtcagctgtgaccacccgaagacaaatcgcgtacgccacctccagctgctccagggcatcctcacagatcttgactggctctgcgcgaaacacgtccttcaattcatgtcgagcttcggcactacgggtacctccaccagtcagtccgcggtcgacatcaccagaatcccgatcaatggcgagctccttcgcaggatctaactcatctgcctgtgaggcttcggcttcgtccatgggagtgacttccgcggcagttggaatgcccagatccagaatctttacatcagcaacagcgctcgagtgactgcgggcctcttcctcagtctgacccgaagagctcatggctcggccactcgagttccgagctttctgtagctcagcagccttccggacttcttcaggtggacgtggcaaaatcttcgtcggccaaacatattgaggtcgcaggactgcgggtggggcattccgttcggcttcaagtgcttccagctcctcccgtcgccgatactcccgcgaaggggtgttctggtaaatctcttcttgccactctcgatacttacgcgacttcggttgaacaaagcggtctcctcgtggcagttgcccaggctccaccaacgcttctaccaccgtgtgctgcatgatctgggtccacatctctgagatattgaccacacgaactgcagcaggccgccgtctggagctgtagatcacttgcgtcacccactggttccctcgggcagtccatacctcagctgtatcagcgtcagcttgaccataccgcaccggaacaatgatcgaatcaccaggagccaaatacaccggctcacgcacacaaattgggacttccaagatgtaacgtggaacttccttctctccaaccagaggaatgtcttcttcatttgggagcttagccaactgctcacgcgcgcacagtcgtactccagccgctttcatgaaatccatacccagcagacaagcgactccatctccaatgtttccaacccacatgtccagcacatataccacacgaattcccagagttaacttcactcgagtccgcgatcggatgtacgtgatcactcctcccatacctttcaccttgagtccggcgtgcgaagtcaacttaagcttcaacctgcgtgcaaggtctgggctcaatatagttatgctggcgccggaatctagaatgatgtgtgtccgatagttgttgatcgccccatgcactaatgccactgcatcttgattatccaagtcgtggtctgcccaccacccgtaacgttctcctgggttcaacgtgaattccactggggcttcatcttcaaatgcagaacctcggaaaacgtagtttcgagaacccgggcgcgattccaacagctattcatcttcacatgcaatggcagtcatgcattgtgggttaccgatctggtgcctaagttctggaccgacaaatgcaagagcgcaatacgcttgggacttaggctcgacacgcactgggtccctacccagcgagcctagttgtttaacgacgtcccagacttagccggttgttcttttagcagttgcttcagaacttcggtcggcaagtcttgcagcgctccttgtcgcgccaattcccggactgccttcaaagcagcccaatcggcacagagcccttcacggtgaaagtctccgcacttagaacatgggcgacgcgagcacttatatgtcgggtgtccagcttcatggcatcggtcacagatcagatcccgccaacaattctgagcgtcgtgcccaaaactgcggcaattttcacagaagggagttgtctcggtatggagagggtggtcgcgcttgtggaattggagggcgccaacccatttgctcagcagcacggaacacctcctcggtcgtcgggggtctgggtacttgaacgatagtctctgaagcctgggcttcgttgatcttctcagaagtcaccgtacgccccatggacgggggcggagttcccgggagataacgtggttctggtttctcttcggagtccgagggcggggaagccttatcttctgactccgagtccaggttctcgaccaagtacgcacgttcaccttgagttcgacgcgaaggagggaatcgactaaacctcacaccactaggcttcgcatcgcgggtctttggaggtggaggcgtctcatatccatcatcacgctgcaccgcttcgatacgcttgagagttttctcgagttccttcatcgacttgaacgtttgtccctgtagtgtgatcttcagacgacgatccgccagcttcttgataaagcgacggatgtggagttcccggtcactcggagagtcttcgtactcgacgtcggccttcttggctgcagcgttgagtcgataaaggaacgatcgcgcagactcgccattctccggtcccaactcataatagcggtcgtacggggacgccttggtgcggcagtactccttgcgaaacagcttcgacaagcgcgaccagtccttctggtccttctcgggtagttggcggaaccatgcacgtagcggggcaggtagtcggcccaagagctgacgcaacttcatcttctccggccagactcccaacgcagcagcgtagacaaaccgatcccaccagttcacgcggtcttcgagcttggcgtggggatcaaacatctccaccgccccatactgaatatacgggcggaacgtgtacgattggccgttagcggctggtactgttgcaggggcgagttcctcagcaaggccgcgctcccagtcggagtcggagcccgagctggactcgctgctagacaagctgccgcttgaacttgaatctgacaatgagggatcgccacctggtcgcttactgcgacggatcctcttcccacgcttgtgtttctgggaagactttttattagccgacttcccagaatatctaaggacatggccactcccactcgcagagtcccgagcaacaccattcgctgagctcttggtctcttccgagttttcttccttgactgcagcgacactggaccgagtctgtgtcgcagccttcggttgccttccacgcttggtctcacttgaccccgtcccccctgtcgcatgtgtcttcgtctcacttgaccttgtctcacgtgtctcagtcggcttcgtcccgcctggtcccatctcgcgtttgacaacttgacttggagcttgtatggtcgcttgaagctgcgctgctaccagcgaatccgcggccacttgctgttgcccgatataagtgggcgaccgtcccgcaaatttgtcgcaagaagtgcgactcgtcgcggtgacttttccactagattcaggtacactagtcgattgttgacgttggcgagcatcattctcacgttgaaccttctgggccagagcgcacttctgcagatacgcggacgtgacattgcgcaactggtcctcgaatgcggccaaatgggcattcgtgctctgcgcgatgcccccactctttgccttcacttcctcgactaccaccaacacagcagcggtggcggcgtccagggccgcagtcggcaatggcgcttcggggggaataagtgtgccgcgccccatctcgggtgcaggcactgacgatggtactggggactgctctaccttcaccgcggcagcaacccgagcttcagcaacttcggcgtcgcgacgcgggactcacgttcggcggcaagggcttcttcgctccgttgaagacgctccatgagggaagcggtctgctgctggttgtctaggcgaatgccacgcaactcggcagccatgtcggcgcgtacttggttgagggcggcctcctgctgcctcatcatgaccagggcgacctcggacgcgccggaacgcgacgacctcgaggacgacacacgagaggagattcctgacatcgaagacttggacgacgcagatttcgcggcggacttccgggatcgcgatgacttcccagaatgcacggacttctgtggtttcttctcagactccgggtccgcgacctttgtcgaagtggcttgagtccgtggcatagcacttgatgtggagacgccacggttcatgccggctgcgggtgtggtggaagacacgaagcttggagggggcaacgacgttggatgcaacccgggagcaggttgcgtcgagtgttctggctggagacttgcgctgctctctgatgactcgggcagcggtacatgcgcaggcaactcctgaaggggttgcagcgaaggcgcagggagtgctgaaaccggcactggataccacacagcacctgccgagataccgaaacccgggtcggcagctgtcgcagccgcgctctcctgcgcaacattaccatcgccatcgggcttggtccaggcatatgactcaaggcactgccaaccatgtagtccgcggcggacaagaacgacgatcctgaggagctgtgccccgacaggtctgttccttcaacggccgcgttcatcgactcgtcggaagcaccacttggtcccaccagactaggaactgagtccacactcgccatcagttcaagacttggagctctagggactaggttctgagtccgaggcacgacgttctgggataccgatggttggggcaccagactctgggacgacgatgtcggcggcatcagggaactgggcggagatcgctcagcttctaaggccgcacgcttgggcgctggttgtccagacgcgcttgaagcaggacttcttcttctggtccgcgtgatcctcaagcggcgcaacaattcttcgccaagcagttccacagcgtcgtccgtcattaggacgtctccatcggcatcagtcggggaacttgtacttcgctcggatagttgcacagctgggagaggctccagcggctgtcggatgtgaaaccctacgccatccatcagcttgttccactcaagactctcaactgcgagtctgagttgaacttcttcaacacctcggcggatcagattctcagacacctcggacaccgcacggacttcactccacgtaggaatcgcattgcgaaactcgaagtcggcctccatcaacatggtctcgagcacagcgacgcatgcagcagccagaagcaacttgggcgatacggtgacggccttcatatccgagaccagcggttgccgtctgcgtttggcagacaacgccttgatccaagactcggaagtccgaccagcgttcacaagacccaagtatttcccagtctcgaatgcggcgaagccccaagcttccatgtcgtactcttcttctccctcgtcgtagaccacgtcgactggagagatgacttctcctggaagagagctccagcggctcagttgttcggctccatacgctcgggcttcgtcgtcagcaagacagtttacgtcggatactgggatttcactcgtgccccgtggaatcagcggaagcggatcttggaacgtcgagtgcagcgtggttggcagttcagatccgaagacacgagtgccaggagcaggcccaagacgtagtggtgcaccggaatccgggaccctcgtctcgcgccactctcgcagcgccacatgatcacgttttccaagagcgcttgcagccgcagggctcagcgccaactccgtcggtagacgtgctgcttgagcgtcggaaccacggtcggggccgtccagggctggactgcacagaacggggaaccgtcacttgagaagctcgtcttggcgtcgaatgggtcgatgtcgggcgcgctggttcggccagcgccagttgttgttcggtctccgtcgacatcgcaggatcttgtccgggccccggtggcggaacagggcgttgcagcggtcttgacactcgttgagcaccttgaccgcgtccacgacctcgtccgcgtcctccaggactcgaagcaggcacaatcgcgttagcgttagtaggcataactcttacaatgcacgttcaacttccaacccctgatccgggcacgcgcaccagctgtgacgaggcgatgcggtgttttctttcagaaaacagttataggccctccttgacagacctcaggctactacagctttggatccgtctcggctggcacagggtgtgtgttgtccagtacacgctgttggtcaggcacacgatgtgtatcccttgggtaacggttcttttcaccaggaggttagtatcgaccccgtgaatcagacagctacgccgggctaacgctggaacaatccaacccgaatagagttatacacgttatacaatcacacaaatacttctttgccctctcttctttctctaggcccaaggctaaggccaaaacacaagtcaactggtccaaatccaagacacttgatcaatcttggggacgcgcaccacctctcggagagaggaaacgatctaccctgtcgccaacttcttcagttcgacacaggcccaatagaccgcaaatatacaacaaagacggtctgcaatccgctaaatatacagatatggaatagatatgatcacctccaggccgaagcagtggatcacttacctaaagtactttgaattttgtcgtggagaacggccttccaggctgtgaaagaagcacttgtgcccttcgaagcaaaacgaactctgtttggttaaaggtcacatgcagacgaaatctttcctaagcgactcctcggagactgcgatctttcggcggagtgttggtctgaccttgaagggtcgccagactggataccttctcggagttgttgggtacacctcggatcttggaagatgccatagtgaaaccaagtgttcttggatttggagccttgaaacgcctcgcacagaggctgttcttgggcttttgtgggaagtaagtctgaggacacgaacgttgggagtcgttattctgggaaagcaacggggaatctgagaagtgcctcagttctcaggtcgtaacccagagtcgagtcccgcctcgcgcagattcgtagggaaggtcgcacacattcctgtgcacttctaggaacgtgatccattcgcctacgccgacctgctttccggggtctcacgtccgccacaaacatactcttgtttttattcggctccaagtccagcacgaactctcagaatcccaggcacgattgtcgggttccaagaatgtaccacttatctggtaccgtggtcatcattcttgaccaacacatttccaccaatccgcgaactccacaatatgggcaattcccgggttttggtcccatgacccaaattttagtgacagcaccgcgtaacacgatccccactgaaatgcaccgatgcagagctttgagctgttagtgggatagtgtggattcaaatatatcgaggtatcgttgggatcactacgagcggacgttgatgtgcttgtctgggcttacgttgaagctgggaatgatttaatttaatgtcaccgtgctctagttctgctctatatcaatcatgcgatgaactgtggtgacggctgggctcagcagtggtgatatattattttgtttcataaacagggttaaatgttgctacacagggaatcgacgaacgagcgagctacctttagttatcggcccgtcagctaccttcacccccaaccatgatcatatctacgaactagtatgacttcttaggtagctagagagaatttaatcgtgatattgctgtgtgtatggtgagggggggggggggattggagatctcgccacaagcacacacactccaggatacaaggtttcatttacaccgccccggtatctcgatcgaacaagttaaaccgtcgcacctcctccatatgcccgacgtataatatgtgatcattcgctaaaacaatcaacatgagctcatcggtccctcacgtctatgttgcctgaactggatgagatgtgtactactgtaacacattcattgagttacataagtttgagacgtgtagttcatctcgtcggattggataatgtggtaccgacggataaaataaacggaaaataaactaacgttataccaaagcctgattcacacgccgctttcagtagccgataacatgcattaatgcagctagaacgtaaatatttacaattatgtcaaaaggcaacaagtactaaaacatatgcttttggcggcactccgcactccgtttttgcccgaataaggaacgggtatacagctaaatgcctcacatatttaatattattttccagtcgattgggcgatagggggatgtgcaaggtactgaggtgaaaaaattcagtgccatcatcagctctccaccctcatttaaaaaatggtacgcttttggcgatcttactagacttcaaactacatgtaccgtagtggtagactcgcacttttgcttttgcaccccgtcccacaagcccacctcctcacccgctccacccatgaagtccacaccgtcctagcgtctccgcctcacttggtccgagaaagtgggcatcctcgacaatgcagctcgcacacctgttatctcctacagggacctggctgagcatgctgtgacggagttcagccccccggccgtccccggtaagacaacgatatgcagcataatcaagtcaagtgcagtcctgttggggcggccgctggagaaggctgcccgcaagaatgcccagcccattactcacaccctgctcggccagaacgtcgccgagtacgtcctactcggcgaagcggaaggtgtgtgcctctcgggcgctatgaccgttcaacatgcacacgaactcgtcgtgaagctcgggatcccggcagcaccgcgtccccggctcggagcctcatggcttcgccgtttccaagagcggtatggctttgagtggcgccgttcctgggggggtccgactcggtgaagttggacaccgctacggacgagatcgagagactcaagggcattgtgaacccctacctacctcaaaatttttttaacatggacgagaatttgccctccccccccccaacaccaccgccaagattcaatccatggaccaaggaatcatccattgtattatttggaaaacatactcaacgtaacatcaacttatatattctgcgtcttagagatatcaggcgttccttactcgggcagattactgcttctctctattgcagattaactcgaccataggatcatattgacgttggacggctacgcggcttggcaaggaggtgcgaactattagagggaccaaccgacacagtttactcaatcacagttacttcaagcttacccttctgtagtgcctcaagtagtgccgagttcgagcgttctgccttggtcacatcgaagctgccgcttgtcagcgatatcatcttctctgctactgagtcggagctttttcatgagatggaccaggctaccttatgcatgtagtgtagcatatacatcccgcagtctaatgaattcgattgaaaagggcttatcttgtacgctaacagttgtagcgccacactggtttctctgctaccctgtttcgcctctcgagcaaagcctcacgtcagcgtatccaaaacagatgccgagttgtgataaccacgtagcgagctaatgtggtatcagagcgttccagtaggtttcagcggattctcaatgatgacgaagctgtagtgatctgaaccactaataggcagcaacccaaagttgtttgccgccagtaggcgctggcaaagatttgctgccactcagacggttacataaccaaactatcacatgattgcaataaccagtcgccattacattactcttgtgcagatgcaggaattccaaaagaaccgtcacactgtagtgcgacacgattgtccacaacgtggagcatttttctttcaaaaccaacaggtactcagggatcgtgtccgagcaagccatcgatccagttgggcaaataccatgcaggagctctgaaaacaattcttcatcaacacatgaaaatggagggctgagccacagcttccctgcacgactcgggcagcgtgaacacacctgaaacctgccatctaagcgaggatttcataaccacagcaagcaaatagaagctccagatgaattcataaacacgatattccttctttcttcgaccggcgcctgcgatgtcttatactgcacgccggtgctcagccgagcgagctcctcgaagttctttcaaccaacatagcaacaggtgaagaccgtttgtgctcaataaagcaggtcaaggacggcgttcaattggatcttctgcataccacccagtcgcaccttaacgcttcgttctccttgcggtcagaatggccggcatgacttgtcgccactctgagtattttgtattttgggcagaagcatgcgcttcgcgtggacttcgcgattaccgtgttactctcgcgttcatggctcacttagacgcatatactattgcaatgcggaggtcaagagccctttcaagtccgagtcctcaaccttccgtggtaaaattgcaagttagctatcgctcagcttttgcaccgaggacacgaggtcgtgtctgtgtttggatagctggatagctgcagacgcatggtggcttctcagctttgcttgttggtcatcaatattgaagccgcctgaattattgtggaaaccgattagattgtccgagcggattagctgataaagcagcgttcgtgagggatttgactagtactaaatcggggattcctatgatttcatatggcatcggtaagggtataaatcggtgtaagataaataaaataggggttgcctcattaccgcctgcaatgcgaggaacgaccacttaccgccacgagctaatgtttcgttcacctactaacgaggaatagcatcgcgtgcattaaatacgcttctgtgagcagtcgatacgtactgctatctatttatcaagttgtgaagtcttgtatttgcgctgtcatttctcgtcagcattagcgtttgtcggttttactttaaatcagccgccgaatgccgagtgggtgtcgaacgttcgggctgattagcatgcaaatcagccatccaaggctttgtaagtcgtggagtagctaaatcagcttgccacatggtgatgtaggcacaacagactgctctgtcaaatcagagtacaaatcttaggctgtcgatctaattatgaggtcggatttgctaaatccgacccgattaagcttaatcatctgcttaatcaaccgaattatattccaattagacaatataatcggtttccacaataacagctcaaccgccaaaatatgtgaaaggcacaatgtaatgtaatagaccactggctgaaaacgtgaagtatttgcgagttattactgtgcaacttagatatcagtgctatttcctggacaattctggctgttgtgaacacttgagttattgcaatattttgacataattattctaaacagtgatattttcgattctaactcagtcaccttcagtgcaactgacgtgcatcaacacatgccagaaaaacggaataaatatgaactatttcgcaaaatcttcggctgaacttagtgatacgcattctaatccatatataatacaatacttcgctaaatgttagtgcggtcactcgaaattattcaagccgggagcccagtcggcatgttctagtcgtttgtgttgaattcgttatcatgaaaaatctgggggttgatagcgtagcgcatgctgtcgacctccagaagaaaaaaatggtcacacaactgatggacaaatcctttcaaattatatatgtttaggaggctggatgtgttttcacaatccttacaagcctacggcatgaggcggagctgtgatttgttccgagacagattttattcgaatagactcactattttagataatacacaaatctattgaaaatatacctgaacttggtttaaagtagaactttgcaatactgagcatcatccgctaagacagacttttttgcgactgttaactaatgtatggcgttttcgcgttgccacattatgctgtcgctaggctcagctgtgaaaggcacaataaggaaagtaatcaataaaaattaaggggggtaccaagggtgtgttcctcagacaggaatttcagcggatttgggtcgttttggcggatatgtacgttttggcggattatacaatccgctgttgcgtttgaggaacacaagaggcatctttttggcggatattcagcggatttaatcctcccgaatttgggcggacagccctctcgtttggcggattgaccagaagccatccgtaaaagtgcatatttatcttttttgtgaatcatcaatggccagcacttcaggctgtttgacttcgccatcctactcgctctacgccaacggcggtatctcattgtgccggtcagtgcgatgaagcaggagttgtaaagaactacgtagtatgcctttgcatagctttcctacacagtgtagtgtaggctacactacgacttctccatccgtccagtagtcgcgtcacacctctgaggcgatgtgatcgcgtagttctgtcatcgctacctggtcggactcgttggtgtcctcgtcgccggcactgtcctcttcttcagcctctcttcttcgtgctgtcgcttcagcatcggcaaacggatcattatgcgaacgaatgaaattgtgaacaacgaacgatgcttgaaccataccgacctgctcttgtagatcgcggttcaccctcaagccagggaatttcagacgcgcccacggttcatgtatcgacaactcgacacgcttttctcgccgggcgcggcgacaggagcattagcagcacatatgacggcaaggcaattgacactacctagagcacagacattgacaccaaacccccctagcagaagacttgtccagtggcgcgagcgacgatagcgacgccagcgatactgacaccaccaacaccacaacgatgccgacgtggaagagacgcgtgccgaggtgcagacgcgtgccgaatcgaaaccaacgggtacaatgtctaagcgattttcaaccggcgaaaaaattgtcgaaaccttagcacggttagctactgcacacgagtcactagctcgatcaagcctcatccgccaaagtaaggagcaacttggccaggtcacgtgccccggcttagcgatcagggacttcagcaagaccttcgtagacctatggtagaagaatgcgtcgcgtcgtggtcaagcgatcactacgacagatacgcagagagcaaggatggcggcaactatagcgacggcggagagaccaagtgtaacagggttacacgcacaagtggctacagtcacttgtaactctaacagacacgacgtctgttaggggttcgaaagacttcctcgaccttggtgtagatacaccaaaggctacatacatttacgaccaccacgacgggtggtccatagagacttaggattcctattggctgagggcagcatctcttagccaatgagcgacatgcatagcattggaattctgccaaccagccgttggcagattcctatcttagaatattacatttagaggaagtcagaaacataaaacaaaaatagcagttctcattttaacccaaaaacattatctggatcgtttatttagattaatctatactcgaaggcccgagtataattaactctaatttaaactaagctacgcttcctcacatacacgcgcacacgtgtaagctaaagtagtgagccaaagtaggtccactacacctggtagcactttgtagtccgtccaacgaccgactacctgagttcgtacgtcaccgcacgaacgcggagctgagaaccttcccatggatacggaggtgtccatggaaagctccactacgcctgtaactcacgatgcacgcgctgtctgtccccacctgtcggacccagtgtgggaagctctccaacgactgtcaacagtcattggtgaggcggctgtagctacgatgctgcgtacgctaacgccgacagagcaacatggtgttgctctgggattcatcatgagggagcagcgagatgctgcttcgtctaccacggtgtcgtcggggacgacaccgcgcgcgcaatcgctgaagctcagcgtgagcaattacgttggaagagagggcgagcctctcctccgttggcttgtcgaactcgacactgccattgcggctcgacgcatcgtcgacccgttgtcgaaggtcgcgttcaccatgtcatgtcttggcggacgtgcaagaagttgggcgtatgaacgccgactctcggatcctacgtgctttagcacgtacgagggtttcaaggaagagctcagacaagcgtttgagccactgcaaaacgagttcgggtcgagggcggagttcctcgacctgcagcagggcaagcatgatgtccatgtttacgctcagagagcacggtacttggtctcgaacatcgtgaccaatccgatcgacgaggcgaccaaggtcgtcacgttcatgaaggggctgagagatgggcctgtgaagacctatctcttccgtgagtatccgaatactctcgaagctgcaattactcttgcaatgcaggaggagactagcctgcggtaggctaagctgcatgcacatgtgcccaggccacagccacgcccggtagtgaggacgggaggcccagaacccatggacctctcgagtgctgcaactgctggaccccagcagtcgcagggaaacaatgtgcgatgctaccgttgtggtagagtcggtcactttgctcgggagtgcacggcccccgtgtaccagcagggtggctatcgcggcggtgccgggcaccgtcgcaaccaaacaaaaaacgatggacgccagtaggcgcggggcgccctactggtaatgcagttccgcgtgtcgaccttggacacgcgacactgaggactgcagcccccagtgaggttcattctcactgcaagaaccaagatgacaagcctgaccttgtcatcctgaatgtggactcgatgagagcaagtggctctctacgtgctttggtagattctggcgcgtcgaagaactttgttcgactgcgaagtctatcaaggcttgacttcgaggatttaaagatacctcgaagtatgttggaagtacgactggcaacgggtgccgtcgtgaagaccgagaagcgcatggtacgcgtgcgcgtcacgtacgaagatcaagagtttgtcgagacctttatcgtcctggatctggacgataagtttgacattgtattgggcatgccgtggcttgcacggcatggtccggtcatcgattgggagaagcgcactctcgtgcgcttcggtcgcgacagcggaacagtgagcgatggccctgttgccgctacgcacgcaccgacaggtgcgcgcgactccccactcgagacagcgcctaatgccgctgtccaggagcgccctgggcgcacgcgagcaagagcagcaagcgtcggcgtcgccgccgacggctgaaggagaaaatgtgttgatctcggagatcgacacccgcttttcagcgaatcaggaagagtctccaacctcaaggggcacggatgacacagacgagtcacacgcctcagccgtggaggctgacgcgaagctcattggatcaggtctggccaataataagagccaaggtgacgtaacgccgtcgactccgggagtcgatggcttgggtgaatttgattcgtcggctcggggagccgacgcaccctccgtaatggagggctccgccaataacaggcgtcgaggtgaagatggcgtgtcggctccggaagccgacgctgcaggcggtgcggacggttgcaaacgttccgcaccggaaaaacttgcatgctgtcatgcagccgggctgcacgacgaagcgccgggcgaccaagccgggcttgaagtcgctcgcccgcgggatgaacccgccggcggtattgaagaggaacacccgtccatggctgggcctggacgaggtcaagaaccaagcggagccgggctccgcaaaacaagaagacggcgcatgcgaaggtcgctgcgcaagtctcggcctggggtcgagacgctacaaggaatgtctgccgggcagacggaggctgagaagccggacgtcgagacgttgaacgtcttgacgcgtacctgtgccgggttccggtacagggagatgactctcgctaaccctccgacgaagcgtcggagttgacttcgcttccagtcatgagctggaagcgcttcgcgcgtgacttgcacgatggacgcatcgagcaaatatgcattctctcggacgccgagagaacgaagagcgagaatgaagaactgaggcagttcttcatggagaccaccactgagagtgaagacactctcagtgcaaagatgaagaaggagcgctttgaagagcagagctgggactcgttgaagacgagtccctactacgagatcttacgggagtacgcggacgtacttccggaagagattcctgcggagcttccgcaggacaagggaatccagcacgagattgatttcgtgccgggcacgaagtactgtgtcaccggcagtggccactgccgcgagagcaggtcaaagcgatcgacgacttcttcgaagtcgtcgcaaagctggacaagtgcgggaatcgaaatccccgcacagtgctccgacgttctgtgtcaagaaaccacagggcggctgacgcatcgttcatgcgtataacaagctgaacgatgcgacgataccggcgcagacaccgataccgcgaaaagatgtcatcatcgattcgatggccaggagcactatatacagtgctcttgatctgcgcgatgggttctatcagatcctcatgcgtgagagcgatatccctctcacggctgtgagcacgccgagcggcatgctctgggagtggctagtgatgccgcagggtctgaagaacgcccctgcgaccttcaacaggtgcgtgacgcacttgttgcgctcggtgcgcgacttcgcaccgagctacttcggcgatgtgttcgtccacagccgggctgcggacgagatgagcgatgttgagatgcacaaggtgcatctccggaagctgcttgcgcttatgcgcaagcacaagctctatgcgaacctgaagaagtgcatcttcggggcgagcgagatacccgtgctcgggtgtctcgttgggaagaacggtgtccgccctgaccctgagaaggtcagagtgatcaatgagtggccgacgccgtcgaacgtcaaggaactgcggcagttccttggcttggtcacgtacttgtgcaagtacgtgaaggactacgcgggcatgatacgcccgctgtcacagctcctgaagaaggacgccgagtgggtttgggctgctgagtgtcagcaggccttcgatgcagtcaagcggggcttgactgaggcgccgatcttggcggtggccaaccaagatcgcccattccacgttgtgtgtgacgcatccgacttcgcaatcggatgtgcgttgatgcagcacgatcacgagggtcgtgatcgtgtcgtctactaccaatcgcgtcagctgaagccagctgagcgcaactacccggtacatgacaaggaactccttgccatgaagtacgcactcgtgaagttccgagtgtatctactcggaagcaaaccgttcgtggtctatacggaccacgcgtcactgcggacggctgtgaagtcgccgcacatctcgcaacggatggcgagatggctctcattcttcgcagagtataacttccgggttgagtacaaacccggaagactcaatgtggtggccgacgcgctctcgcgtcgacctgactacgccacgactgatgccgacgtcaatgccattgacgccatgcgatcgagcaccccaacgtcgtcactgttggacgacgtgaaggtcgcgtacgcgcacgacgcggacgcgaagctcttgctggcctacggctcagcgccttctgaccatgctcgtcagaagctgccgaagcatcttcgtgctcgtgcacacagttaccgggtgcacgacgggttattactctatagtgcagtcgacgacaacgcggtccgcgttgtcgtgcccaatgaccatgacctgcgactcaggatcatgtacgagtatcacgatgcaccgactgcgggcatccgggccgtgagaagacataccttcttctcacgcgagacttctactgggcccaccagtacaaatgggtgcgcaagtacgtccgtgcttgcgaggtttgtcaacgtgtgaagcctgcgcctttcgcgcaggctcccttgcagtcaataccaactccacgaaagtgttggcagtccatgtctttggacttcgtgttcggtcttcccccggacagccaggggaacacgggcgttgtggtctttgttgaccgcttcagcaagatggtacattttgctgcggtacccgctgaagtgactgcgaagcagacggcgcgtctgttcgttgacatggtgttcaaacaccatggcatgccgatcgacattgtgtcggatcgggacccgcgcttcactgcacacctttggcaagaaatgtttacacttcttgggagtcaactttcgatgtcgactgcggactatccgcagacggacgggcagaccgagcgcgtgaaccgcgtgcttgtagacgtgcttaagagctacgctcactcgttccagcactggagcgagtgcatgccgatggcggagttcgccatcaacaactcggtgcatgcctcgaccgggcatacaccgttctacgtgaatgccatcaggcacccacgcctcccgagtctactcgggatggtggctccttccttaagtgggggaggatctacgactgcaacgcagcagtcgcagaatgctgctgacacttgcatagtgtcagccgcgactacgcgcaacaagaagaagaagcacgcgtctgtgccctccacagacgtcgacaagagcaagaagaagaagaagaagaacgggtctgtgcagggcacagacaccgcaaagacgaacgcagaggccgggcctactgcaagaaacgagctgaacgagttcagcttggacgcaatcaactcgtgcagcgcagacaagccgtcattcggtttgtccaagacgctatcgcagcttctgtcggtcgacagaagctgaacgcagacaatgttggtaggggcaacactaatgaattcaagaaggattcattggtcttgttagcaactcaaaacctgcctaaacatgcagtttccgactccggggcgagcaagctcgctccgcgcttcatcgggccgttcacggtgttggtacggcatggcaacgcctacacgctagatattccatctagcatgcgcttccatccgaccttttacgtcgggcggctgaagccatacctgccgcacgagccacctagctcggctggcccgaagcggaagccccagcgggagcgaacctctgctccagcgcgtaaacgcgctgggccaagcgtgcgatgcgacctcccacgtcgacagagatgtccgatgcggtctgcgaggcctgagcgacttgagccctcaggatcgccacctcctgcatcagagcggcgaactcccggctttgacgctgttccacagcagcgacccgctcctcgagcgtcgggccaaggtcaacccctggttgaccatacccggggcgtgttcccaccaccgccgcctccgatccgcgacgcccgcggctcaacacactggattgttgagcgtattgtgaaccatagtatcccgaaaacgaaccggcagccggttcgttatcgtattcgttggagagggtttccgtcccaccaagatacatgggagccacgggacgtcctgctgcaggacgttccggaaatggtgagggcgtacgaagctgccgacgcgaaggtagtgcgagcgctgtgtcacctacagcgcccgaggtcccacgatcgtcgcgttcctcgcgtgccaagaacttggcacggagatccttgagactctcaggtacacgaatcatcgtgtacccgtttaggtcgcggtcgctcaagcgcaccgcaccgtgcactgatggccttcgggcacagcgcatggaataccagcgtccacagaggatctgtggagctgctccagcctcccgcgcgtcgagaatgtctcgaagcgctcacgggcatgcttaacccgctcacggtaagcaaccggcttcttgttgaagttctcaacaaaagcattccaactttgacaaagtgcctgccactcaggcactttgctgcgagaagaggtcttcttgctggagaagtatcggagctcgtgaaagagtccgatatagtaatcgcgcctttgattcgttaacggatcaaaatgctgctcctccgccacagcatcatcgtggatcccgctgcatacgtacagcggaatttggaggcacagatctctgacgcagacagcatccacggatcgcgcgctgcctgagcagcgcgcagagaacttgaagacgccacctcacgcggggagcttaaggccccagcagcggagagcggagtttcggtctcgccgcgcgaacgcttcgagcttgaagcgtccgaatcgtctccttcacgagagcgtctcgacccggcatgcgggtcgagactatcactgtcgatagactccttgcgcttgttggaagaggcttcgccctcttccatctctacgtcgtcactctcgtagtcaacggcgtcactgactacagaggaaccttcgaggacaatctccgactgggttgtccccgacgcggcctttgcagcgagcgcgtcgcgctttgcctgctggcgctcatggtactgagcaacagagaggttaccctctgttgcggcgacggtcttcttctgcggcgagctcattgcggaatgagctcgagttttctttctcccaacgtgaagaattgacgaatggtcaatttcctgattgacgtgccgtgactcggcgcgtctaaccttgagggggggatggtgtaacagggttacacgcacaagtggctacagtcacttgtaactctaacagacacgacgtctgttaggggttcgaaagacttcctcgaccttggtgtagatacaccaaaggctacatacatttacgaccaccacgacgggtggtccatagagacttaggattcctattggctgagagcagcatctcttagccaatgagcgacatgcatagcattggaattctgccaaccagccgttggcagattcctatcttagaatattacatttagaggaagtcagaaacataaaacaaaaatagcagttctcattccccaaaattagtacgacaatgtggtccacattgatactttggttagacacaaggtcagacattttccgtggtctcaattcgtctccctgtttgagtgtgtgaccagggagcaaaccgcaattcgcacagaagaagtcagatacttgtcgaaccagaatggaaggccatggttgggagaagttagagaccaccgtgcgcgagattcgcgacaataccgtcaccgcacgctcacgcgccacgtaccagaactcgtactgccgtttcctcgcttggcttgtccgcaacaagccgcacctcgcaccccagccatttctcgaagccctcggtaatacggctgacggaagcctgcagcagctgcgcactacgatcaaggccctcgtcacccaggatcgccgtattgtccctctggactttgcggcagtagcgaagctacgcggcttgatactgtccaggacatcatatcagagctggagaagagggctatcggagcagggacagttacttacgacgggctgaatgacgctattagggcatgccttcgtgataccggtgttgctggctagtggtgcagaggccgagcgccagatgtgccacttctggggtggcaaattccgtcgcgtgcctgctgattttgggatccctgactgctctgttcgtcatgcatgggtgctttggatgtgtggaaataaggccaagcaagttccacctctccgcattcttgtcggccgcgatatgcctagtcgaattctacaaaagagcctaagccagctccgctttctcatgcgcaagatcgagaatgatgccgcatctaaaaatctgcttcaacttggccagtccatcgacgcagcgactcaagtcttcttagcctgtgcggatagcgtcaccgtggacgatattacggaacactcacgaaaacgccgtcgtgggcaactcagctgggcgacagtaggaaagctactgcgaaaaaaagcaaaaagaacagtcaactaatgatgatccatagcaatgagaacaatcatgacgcgcttatgagaaccacgttatttgcatatgatattaccaactgctcattgctgctcagctcgtgtatagcctcgttgattgctgaataggggcatggggagcaatgataactcggtcttgaccagcgcgcccttgagccccacgatgtccgtgcgtgtggtgctcttcggaggtgatcgtgaacacgagcagctcttgtgccacgcgcagcttctcggtcaccttcgcgcgcagcttgaggtcctcgatgtgcacattcttgtggctgcgctagccgtccttgtcctgttctcctgagcgagccgtggtcttgatgggcgcgaagtggcgcgtgtgtttgggctatcgatgatgatggtgcttacctggcaaacgttgctgaagtaactgcgcgggcgcggcgcggtcgccaccagcagcgtcttgcacgtcgccggggccatgacgccagaaggagcttgcacgtcgccggggcctagcacatgtcggcacttgcaatcagtaggggaagcaccgaagagctctgtgtcttgcgccgaacgttcgctaatgcgaccaacacagcctgccaaaacgccttagctcaacactacctatcaaacataatatatattgtgctgtctgacatttgtctaacgagttccgtctaagaatcattttaacctaaaaacattatttggatcgtttatttagattaatctatactcggaggcccgagtataattaactctaatttaaactaagctacgcttcctcacatacacgcgcacacgtgtaagctaaagtagtgagccaaagtaggcccactacaccaaggagcacagcaagttcatcgaggacgacgagaccaaaacgagcacgacgacgagcacacggcggacatggaccacgccgacagcaagtagtctgacggcgatctcaagtacgacaggcctcttgacaagcggccagctactaaacttctacatgcacctcctacactatcaaatacagccttttacgtttagatgcgtttaggcaccatccgcaaatgtagcgtgaagggatctgcgttatcgttagtcattgaggcttgtcctcgctcggaagcatctcgctgtttccagatcccgcgtcatgcaccgtaggcaccagtagacgtagccgcagacggtttaaagttgacggacactgtggagctggatagtgagtagttgactcccacagactcgtcctcaataaattttggagcgttcgcccgttgtgaatcacaatttgcggtgctgatgaaagacattttgttagtttgttgtaagataccccaacttcctacgctgatgggcataccgacatcctttcgtttgaattgttagtgtcagtaagttatgtcgtaacgtcactggaagtagcagctgtattcagagtattggcgagtcctgctcacgagtcacgagcaagatcgagtcccctacaccaaagcagtggccaactgacctgcttacgtgctgtcttgacgacaggtcgtcgttaggaagtgtagctcaacgatttcgctttacgcacgcaattgcatcagcttattgtgataaggatgtgttctgagcttatgctgtaaaaatgcactgctgatctggcactttgatttcatagccccttacagtttgccgtacagggaagactgactgcattcagtaaacttgcgggcaaagcaagcaagcaaggcgactactgcaggggcctaggcactcagtaagtacaacgaggaggagaagacgaagggaagtgccccggcaaacgagggtgaagagcaaagacagcgcacaacacgcggtagatatgacagtgagtattgcagtccagcaacgatccgagtgctcgaagccttttggcaaacaagggcttggcggaggacttgacgtaagcttaggtcaaagtaaaggcaactaagtgaacctctaattgcatacactctatcccataatacacgtggtctaatgtaattttacagtgcaatttggagggtagcagatgccggtggacgtgttcctcatcccgtctagcggatggcggaatccgctgaatgcttctcaattggcggattgctcaatctgacggaatcaaacagcggaactgaggaacacaccccaaaatcctcctatctcagccttcacggggccctatttattaatagctaataaggggttacgacagatgagcgtcttagccgcttcctatattaatgataatgtgcttaccgcggtagtaatcacagccaaaatgctccgtcccagctaataaaatactttgtcgtccacactgtcgacgcaaagcttcgcagtagacttagtccaataccctgtttcatgcattttaatgcattttaaaaatgcatgaaacacttaaagtgtactgtgttatctgcactctgtgaagctcgtctgctagctcccctgccaggagagctcttggcagtgacgcaggtcggtcttcttatatcctggcgttgcacccctagagtccgcactacaatagctccgagttgctggaacgggttcgctggctggaatgctagtcgttgggtccttctacgccgacatgcttcttggctatgctcctcgcaaccgctcgctaccgatagataaaggagttcgagataaataagacttcatcgttccgccctactacggtagcgttttttttaacgatggcctgaaagggttaaaccaagactggctttgcttctatacaagccatgataatggtgattgataaatttatcgattttatctagagggcgggggcagtggaccctccactaagggttttggccagtttagtagaattgaccagtttaggagcaggtcgaagtaaaaaaagtgataaaattaaagagctaaacgcgttttaattgggcgatgtgacgttcacttgctcttcaaattaaagcgatttgcgctttaatttggcgaccacgcgatggtcttttgttgacgcattaaaaaaaagcgcaggacggatgagaggctccccaaggaaagtaacgctggtggccgcagtgtcgctagtgatagccgccgtctgctccagcgacaagtgagaagctacagcagacaaactctaccacgaatatatgaaacaattggcgggaacccgggtacccatcgggaccccggttcccccaaaacaaccgatacatatgtaaggtcaatgtatactgaaatgaagtaagcttattcgagtacgccctacgacgaagtctgttttggtttggcggaaaagaactggagaatggaaggctggtttgccttaagtttcgttttcttcttcttggggcggccgggtcgacacttggctgttgcccgctcggtggtggaatgatcagcgtcttcatcggcactttccggtgcattcagaatggcctcaggcacggcaggatagtaatcgagatactttttggggatcgaaaaatacttcgcggccagtgatttctgctttttctccgacagctccatagtttgatggcgtggaagctggacgctcgcgatagacgcctcccaaatgcttcttacatttggtccaaacagctctgcaataacagcctttcgaatgttggcaaggttgctctgcgaaatcatagaaaatgtaatcgactcatcgtctggcgtattcaccgttttgcgagcagtacagaccccttcatcaatttcaaacaggtagttggctgtgtatccagcaggaggtgcagtaaaatattttgccagtaagtccccccatcctgtgaaaaatggtcgagaagaatcattgtggtcgaggaagacaccctcaacactcttgactttgttgacttcttcgacaagtccagcgggtgtgtacacattctgtttgtgtacggcacggcgacaccacgcgataacccgatcagcgatgttatgcgaatgacccggcaacaaaaagcacaaaacaacttgctggtagggaaataccactgacagcatagcaaaaacatcatcactatcatcgatttgttttgtccgacgcagttgttgagaatgctgaagctgacttcgggtggaggcacgccgttcctcgcatttttttgcagagtcgacaagtgatagagtagtcttaggctgcaaagggtgtctgcgtttttgccttgggcccgctcatcatagaaatatacgtggttgatgttgttcgtgatgtcagcgacgacgaaattctggataatcaaaggactgttgaagtagtcggctgatggtcgtgagtggccgtaatgaggcatcgaaataccgctgccatagtcttcagcttgtatttgcactcgttgttgcttcgggatggcagaaatatcatcttcagacactttgtcatcattagatctgtcatcatcgcaatcaaagatgtccgggataatagtttctggtagatcctgttcgggggcatgcagagccgagaactccttcacaaatttagacacaaaacgccgctgcgctatagcctcctcgatgtgggtactcttcctcaaaatgatggcgtccttttcggcgtcagtaagatctggctgctgcaacataatgtccaaacgcacgcaacaatcgcactcgtccactttggttcgggtcaagcgcacgccgggatagtagaagtgcacatactgagtgaaccgctcgtaactcatcgtgcgcgcgtcaggatcatttcctttggtatcgtcctcgtagcgagcgtgtaccgttcgccaagttaaattttcctccgtaaaatattgtcgggggcggcgatggggacatggaaaaccatcttccaaaatccaagtggagcaatgagctttaaacgattctgatgcaacgtctccaaaagcgtgccaaggcttctgagcaggacggcgagtgtgaaagtgctcaacgccagactttaaacttttgcgcagacgcgtacctcgactaccgccgataggaagaatggatctgatttcacgatcggataactgctgcagtagattaagcactacaccctctgactgctgccattccttgcccccgtagctcgtgtcccaagagtcccagtcgcttctgatcttctttactacatcttcacctagctttgcgatggctcgaagacgtgcagcttcttctcgatcaggccctttctgtcgtttacggagaggggcggttgtttgcgaacctcccccgcgtcgctgcatcttgccgcgtttgaagccaagctgaaaatggcagctttgttctcagcacaagtagtttcgcatttggataggatggctctgactaaaaataaataattcgcgatttggtcggtatcatttgctggaacccgggttcccgccaactgtttcatattaggcagaacatgtagacaaattctaccacgaatatattaggcaggacatctagaccaattctaccacgaatatattgagaagagtatgtagtcctattgctggtgcgtgttgttgctaagaaaagcaagcagagcagcatttaccctttttgattcctcaatcgcacttaccatcagctcttgggtcttttcaattttgaattttggcgagctgcgtcgaaacactggcacgttctgtggcatgctccggtgcggctaaggcagctgctagtgtcgtctccatcgtcaccaaagcttcaggtagatccagtttgcgtttgttacgcatagcggcatggcgctcctcctcaacggcggtggtctcctcatgtgcaccaccagcgtcactacctccgccttcgacgagatcgccgctgtcatggctgccctcctcatcgctcacctcatcaaggacagtctcagattcagcgtccactggacgggccgccgacgccccccccccctctaactcgccatcactttcactgtcaggagaaatacccgggaattcaggcaaagcaacgccgcttgaccgctgaattttcgttcagagtctcgtgagttgcgcccgggcgttatggcgcgaaaacgccgctccgtacgtgacaactcgaaggtgcagtagagtcttaaggcgagagttgctccaagcaagccgagggggcttgacgacagccgcacccagtggtgaggggccgtcaacggaagacgcgtcagcagcaggtgagctcatcgccactgctgctagtgtattaccggtttataacctgaataaagcggtatttcaatcggtgtctacgtagaccggctttgctctttcttcgctgtttaaatttatcactttcttacttcgacctgctccttagtagaaccagtaatattgcagaaataatgaaatacgtgctttggttggcaataaaactcttaccgtaaaccacggcttgaatgcaacatacggattgaatgcaacaccgtaaaaactgtcaggaattgactatgaacagtgcacagataagatacactcgcatgacacaccatatttatattgagatttgtatggaaaaggctgttcttttttcaaatccccaaataatgcccaaactggtcacatttggtttttacgcagtaaaaaatcagaatttgccaacaatttaaataggacgagaactttttacgggtgttgcattcaatccgtggtttacggtacctcgcttttccatatggtagttcgatacaaagaccagtattattccgctctactaaactgatcgcagcatactgtaggtatgttttctttggcgcgctacaatagcactttcatagctgctaactgtgtctggattggtgcacatgttagagcaaatctagggctttcattgtgtacacgttttatctccaaaagattagtagttttctactatatatatagattagtagttttctactatactagtagtagaaaatacttagtacttttcaaagtcaaaaattcagcttgctctactaaactggccaatccccttatgaagtatccagcacgagaatgcaaccagcaacatcaaccgtgaatgttgaatcattgtttaaattagtgtcttccgcttttctgcctatttaattagagtgcctgctcataaatcgacgacgacgtggacggctgcgcgcttggcctcatgtccatcggactcttggtcgccaaggactgttcccttgcctccaagaacttggacctcattttggtgagcgactgcgcctccgtgttgcgcgagtagagtcggcagaacgactcgtgtgcggggtaagacgacgagaagtcggactctcgtgtcgtgggggccgtctgggactgacccagcactggaatcgtcgggcgctgcttgtcgttttccatgaacggcacagcgtcgatcgggtacccgaatccgttggggttgaagccttcaaactcgtcctcaatgcccgcgtgcgccacattgcgtccagtcttgcggaactgaatgaacgcgcccagcaccgcgatcaccacaatgctgccgagatacgcccaccagacagtcgggatagagtacaccaagtctccgctcgagttcctgactgcgtacttctcgaggttgttcgggaatgggaagtcgccagcgaagaagccaacgccccacacaaggctggcagcgccgaagaggctgatcccgacgacctcaatcggtttaccgtgcttcaggtcgaacgcagcgaagaggacgccgaacaccacgcacagaatcgtgaagaactcttgagtctttccggggaaaacgtagcacgctgctgagttggcgatgaggactgcgagtgtgagtcctcccgacactccagcgatgaaactccccttcgggtgcacccacatgaccaggccgccgcacactgcgccgccgaggatgaacgcaatccaggagcccagaaccatatacgacttgccgaccagcatactctcggtagtcaccgcgatgccaacagctccaagcgcgaagccgatgacgaatagcgtctcgtacaggaaccggtacccgaacgacattattcctccgccgaggaggatggcgaccaccgctagaatggagccgcccagtccgaggccgttagtcgagtcgaagattgagtcttctgctgctgctgctgtcgccgtggtgttcaacgcggcctgtgcgctggacgcgagcagcagcattagcataaccacgagcatgttcgagcgcgccatgttggggacgctgacgaatgcaccgtgcggtgggaatcggataatgggagtcgagtgcgctaagttgtgcaatgcactggttctagcggtgccatgcggctcgagctccgctaccactattccacatggccagcattaggcgcttgatcgagttgtgggccacaaagtcatgcttactgtggcttttaggctcaacgaccgaacgccgttcgaatcgaacttcgatagcctattcgccagctggctgttcaatgacagtctcaacttcgctttacactgaaataagctgtgttcgctatgaggggggactgcaatgccacgggataatgcagctggcgttacaatttgacctgctctctcgcgccgagtctcgacactgcgataagggggcatgtggaatcttacacttggttgcgaatgccccttgggaatgagacttgccaggacccccacagcaaccagtagctgtaacaggtacacatttagctcgcattcttcaattcgcgttgatgcagacgcaatgtcggaaccggctggatggcaagcacctgtgggcccgcgcacgaaagtgtgtcaatctttgaagtggtggggtgccctcaaacccgttcgatttggtactcaagacaaaaggcaaaactgcaagtgtgatacatgtaaaaggtttcttgacggttatctcggagctgtgtactctagcatcgaggaaaagccacgcaaggtcaacttgagtgccagccagctcgactgcacctcgccccaagctccaagtatctttgctggagaagggggttaatgatgatttaggccctgaatttcaggcttctttcgagcagcctgataatctactccttggagctcttgcgtgaaagagtactgagagaatgggatggattcctcgggcctccagaaacgagaaagtcagccatcgccaaagcattcgcgttaacagtcgacagacgtaagtggctcacgtctgtcgactgttaactactcgtgacgcggattcacgtgggcaggaagcggaagcggcgctgcgtacgtctgattggcgttgcgaaattgaggacttgcaaacggttttgattttcgattgctggagcacgcagtgttgatataatagtcgacggggtctcatccaaagttgtgcattcaatgctcctggcaggagacgccgagttcgtgagcggccagcatgtacccatgtacgtatgtggtcctacaactcattcaattcccactcaaagtcaagatcatcgcaagaaataacctctagcaacttcgatgcacggaggacattcttgaaattttgccagtgtttactgctcttgccggaccattatgccaggtagatactcaggactggtggtactgtaagagcaagtgagttggagatgttcatccggttgcttgggcaaactcgtgacaaatcctaccggttaccctatttgtgtttgttgttgattgtttttggaagtaaggtaaattgagtacactacgctggtaacgagctcccatcgccatacttactgtactgctcactgaccaccggttacccaacctgcatgaaaattagcttgcgagattcgacgacgaaagcgtgaccttcacaaggggtgcttgttccttctatcatgcggccagcggataattgagaacttcatacctggaagttgaaagcaggcgtacagtaagtaagtaagtacaatacgcggcggctacttcgtcgcattcccaaagaaggccaagtagcttactggtttgcagttgcttgccaacaaagatggcagttggcagttggcatagcagtcggctgcgagcgtaccggggacattgggcttgatgctatgtgaccgaagtgtcggaacagctcaagatcaccaactcaagaaaccacttcaatgtcgaaagcaatggaccgaatgcaagtgtaaaaaggtttcttaagttttttatctcggtgttgggtgcctggctgacggcaaggcactcgcctagtggtacatccatcctacttggttgttgtgtggtgcagtggtctgtctccccaaaatcttctttagacgtggctgaccgggttgccgtagtgaacgttctgctgcggagtgcccgcctccacgtactgcacattgggcgtctggcggcccagggcgcgcgacttgtggtacacgccgtcgcggccggtcttgcggaactgcacgaagaggccaagcacgaagagcacgaggatgccggccaggtaggcccaccaggcgtccgggatggagtagacccagtcgccgttgatgtccttggacgcgtactccttaaggtcgctggtggacgggaagtcgccggcgaagtagccgacgccccagaccaggatggcggcgccgaagaggctggtggccacgatcagcacgggcttctcgagcttgagcgtcagcactccgccgatgatgccgagcacgatgcacagcacgatgagcacgacctgcgggtggctcgggtagatctcgtagccgaccgagttgtggatcatcacggcgagcgccacgccggccgcggcgccggcgatgaagatgcccaacgtgtagagcgagacgacgatgctgccgcagatgaggccgcccaccacgaaggcgatccaggaggccgtgaccacccacgacttgtcgtcgaacacgtgctccacgaccatggcgaccacgacgccgccggtcacgaagccgacggcgaagagcgtggcccggaagaggcggtagcccatgacgaccatcacggcgccggccgcaatggcggcgatggccaggatgctgccgccgaccttgatgcccttggccgagtcgaacagcgactcgaccgtgtcgctggccgagtccgcggcgctgacgagcagcgacagttggcccagcatgagcaggaagagcaacgacatggacggaggttggcgagccatgacttgtgaactgttgtagtttgttgtggtaggtggtggttggtgttgtgctcagttgggagcgaaatgcagaatgaagaataagtggagcggtatgagtcaaaccgccaaccgtgggcggtaggcacgcatgtacagcaacctacgcttttcgctagttgagctcggtcgaaaaattggccgtgtccaacggacgcgaaatggcgcgatgtgattggctggaaacgtccaatatccactatttaacatgggtacactcggagattcggcagtggtgccgcacttggtttggtgcccatccggttgcccctccgtgaatctattggcggcaccaggtggcgcggtgctcgctgttcgagcgtgtaggacactgcgcggcgttttggctgccgtggtcagaagtgagacgcaaaatctgcgcgcccaaggtcgagtcgtgcatggccgctgcggacactgcgatatgagcctccatcgctgtgtccacgataggacatcggggtccaccatggccgagttgaccgagcgtgatggctgcaggattcgcaccttgcagtgcaacgtgcagcttgcggcgctcgttggtacatgtacactgttgtccaacttgttgaagaatccagacctcagtcgtcgctgaagaaagctttgtcatgctcacgtcagcgtacatgtaccaagtgtttcggtctcagctggacaagtgattcggtctcaagatactttggaaaaataccgtggacaagctcagcctagtcttatccctttcgtcggtaatgataccataacatctgtggacgcaccaccatggccatcgccatggctcagctagccatcactacaaacacagcaaacaatgcaacttgtcatcaaacgtagagaaatacattttacgaagagcactgtacgctatagctcggtcggcagttctgggatttatacggctccctcgaacttgccttcctcctcgccctcgtgttcgttctccttgtctgcggcgtcgtccttcacaagagcgccagtctccatactctcgtcctccgatgcatcctcatcagcgctggtttcagcggccatggcggcagcagactcatcctcgttcagcatcgagccgccagaggtacggttgcgcaccctgcggacagcaaacgcgaatgccacggcgatgacaccaacaaatgcgccgccaaccgcaccgtactccatgaacgaagtggatcgctcttcagccttttcggcagcaagggccacgctctcgtcgttcagctgctgcgggtccacagtcactgtgtcgccgagtgaccccgacccagaagacgaagtcgactccgagccgttcaagaagtccttcacgtcatcgactgcgtcctgagtggtgctcttggcgctgtcgtaggcatcctcagtggcattcttagcgtgctcgagcgcgtccttcgtgccgttctttacgtgctcgtagacgtcgcccacagcgctagataccgagtccacagcgtcgtcgatcaaacccttcttgctcttcttcttcttgtccgtcacctcctcttcgtcgaccgagtcgtaggattcctctcccccttccaggtcgttgacatccacccactccgcgttcgagccagaggccgaggtggactcggtgccgttcaggaagtccttcgcatcttcgtacgcgtccttggtgccgttcttgacgtgctcgtacgcattctccgtagcgttcgccaccgtgtcgatggcatcactgatcaagcccttcttggactttttgtgcttgtgcttcgtctcctgctcttcgctcgcgctgccctcgtcggactcgctctcactggcgtttcctccttcttcctcctcctcgctgccttcctcctcacttccctcgtcttcctcactctcgcttccctccttcgactcgctgtcgctttcctccttctccacctgttcctcctcctcctcttcttcgccctcctcgctgcctacaaactccaccgagccatcaagcgatcccgaagccgattcctcgaactcgaccgagccgtcaagagagcccgaggccgactcctgcacgatcgtaacctccacgtcagcgtacgagcccgaagcggacttcccctcgacctccgcgctcgaggtctcgtccacgacgtccttcttgtgcttgctgctcttcttcttgctgctcttgtgcttcttctccacgatctcctccttctccttctgctcctcttcctgctcctccgaggccgaatcagactcagattcggcgctctcggactcgtcgctcgcgctttcgtcctctccgctgtcgctctcctcctcttcgccctcgtcgctctccgactcgtcggactcggagccgtcttcggcctcttcgctgtcgtcgctgccgctccactcgggctcctgctggctcacgacgtcctgggcgctgccgctgccgacgtcgggggcggccacctccaggctgccgctggcggacgaggacggggctacgagctccgacacggccttcttgtggtggcggccgtggtggtggcccgcctgctcgcccgaggccgcgccggcggctgccagcgccgccacgagcaggaagaaaggtctgcggaacgccattgtcggtcgagcttctaccacgcggtcaatcgagcgagtaagactttgggccgagcgaggaaatcggcgaatgatctgaaggcggtctccagacgttttttgtccggctagcccgccaggctcgaaactgacattatttgctgacatatttgttatagcaggttgaaaaccatagtactcgaccaaaaggtcgcgaaaagaacaaatgcatttatatgaagatggaggttcgtgggttacaaaatgggttagaaaatcaatgtgaaaatccgccgccgacccgcgagacaaacgtcattcagctgccggtgggatgtttgtgaaggcagcaaggtcgcgcgagcaagtgtccgtaagcgtattccataggcatggcacgttgctgttgttttggctcgccccgaaaaaatcgatcgtttggctgttgctgacgtggcggcgagtcttgtatcgagttgaaaccgctgccaggcaccggctccttcagccgagcgtcatgttcgcttgaaacggagccaggatattatagcattagccaccgctgctgcggcgattgccaccattggttgctgctggtttctgattcctccattgcatggagtggattgttggcgggcagatgtggtgattattgcccgtgtggcgcccggaaaccacagtcagcctgcccgcacgcaaccttctgccgactaagtcaacccacacgtgaagctcataaccacgtcatttgcagtgcattttgcaagctttgcacgcccatggcttgcaagttgcatgcaggtgatcgatcaccttgggcggtttcgagcggcgaaatgtcacgactgaagtttgtgactgaagtgactttaaaatgatcatgggtaccgtttgatgggtacgtatgtgtagcacacacaatctcaacaaagtaccgttttcatggtacagtgcatcgcttcgaggtttttcttgtcctcgccgccgacatacatttcgcgagaggtttttcctgctggccgctcgtccgctgcacggtggcgtcccccttggaggtcaccaccagaagcacaagcggaagcgcagcggaagacagctcagcctcagcccacgtagagaacaatgccgcccagcgtggagctcgtcaagttctggtccaagttcggcaaggagtacggccgcacggtgcgccacctgtcgccgtacgaggtgcacccggtgcgcagcctcttcacgaccatgccgtacaagaccgtccgcaagatcaaggagaacggcctcgtgctcatcccggccacgctcctgctcgtgggcaccgtcaagtggggcgtcaaggccaacgacgaggagcaccgcacccactggagctaagcgacgcggcctgccgcaatcagagctaaagtggagctctctgcgcagctcgacggcgctcgtctctctcctctctggatgccaagcgcagtctgcccaggatcagtgaatgcagactaggatgcaggtgctcattcggatgaagatcaaccagggcggagtgaagcagcagcagggaagagaaagaacgtgacgtcgtgcagccgtgcagctcgtggactttgtagcgagatgcgaaggaaaggatgctggagctcaaaggcttcgagctgtttggtgcgcagggggcagttaagtacacgaaataaacaagaaaaaacacgaagaaaaaaatggtgaacatgcaagcagcaagcgtcttggtgtcctcctccatggttctccattgcgggctgtgaggttatgttggtgtggcgcacaccgcggtctaggaaaaagaaggaaaatccgtcaggtctatttccatcctctatgctcagaaaaaaaaaaagagcgagtctggtgaccaggccattgaacccgagcagctcattgcacgtgcccgcatcatcgacgctcctgctcgacgggacgtcgcaaccgcctggcactgccaagacctccctccctcctccagccagccatgctcaactccccgtacgccgctgctgccgtgccgcctctctccaagccgggatccttcacgtcctcggcgtcctcggtcgccagcagcaacgggtcgcagcgcccgccgcacccgatgcggaagccgtccaccaaggcgctgatcctgcagcagaagcagcagcaggaggagcagctgcagcagcgcgcgacgctggccagagccgacacggcggacgacgcactgctgagtcgggcggcgtccgaggtccctacgcgtctgacgccggaagaggcggcggcggtgctgcgagaacgctccaactcgctggcggtcatggagtccatgcgctcgcacctgccgggcaacggccacaccatgagcgtgaaggccacggcgaagctgaagaaggagatggacaaggcggcgagcgtggtggagtcgttcctgtccccgaagctgctgaaggaccagtccatcccgcacgagctgctggcggaagcctacgggctcgtgttcatcaccatgtacaaggtgggcttcttgttctcgggcaaggttggaacgggcttcatcctctcgcggacgacgggaggctggtcggcgccgagtttcttgacgtccggaggctttggcttcggtatgatggcgggcggagaggttgtcaactatatgatcatcttgaactcgaggagcgcagtcaaggtgttcacgcggaatggccaagtgcagctgggatcggagttggatattgcagtggggcctattgggagagctgcaagtgctgcgctgaatgttgggcctggcggcattgcgcccaactactcgtacagccacagtaagggtctatacggaggcatcggactcagtggcggtgtcatttgcacgcgcaagtcgctgaacgccaagtgctacgggccgaatgttaccgcgcgacagcttctgggcggagaggtcgcgtgtccgcttgctgagccgctgtggagggcgctggacaaggcgctgggcatgcagcgcgagtacgtgaacgggttcccggtgctggcgcccacgtacacgggcatggcgtgcgacgcctgcggccacgtgcacacaacagacagcaacccgaatgcctgcgcgaggtgcgggaacctgctggtctacagcgtgagcgtgcactctgggcggcgcaataccagtcagcttattgcctcgacgtcgatgagcaacccggcggcgtaagtcgctgcgcgcttggggctggagccgttgtagccccagtgtttcgtgtgtgcacgcgcagcgatgcgtgctttattttatagctaagagaagaagtaaaactcgcttgttcctcctcttcaaacagcaaacgtccaatgcggaaagacacttcaacgtggacgtgtgacgaggcagatactttccctttgagaattgataattattcattttgtccaaagtgtcggaagatctacgatggagttccgcggcgcagggcagttcccgtcgctgacgccgcgcatcagcgagctgtatggcgccagcgggggcgtgttccgtgtaggcgaagccgacgcgtatgcgcaggacttggacgagctggagcgcgaagagcgcgcgctggaaaacatggtgcaggctttggtgaaccgcccggctgcggtgccgattggagtgaaattccaccgtgaaggggccggcgcaatgctgcaacagccagtggcgactggcgccgacagctccagagccggggaagtggctgtggacccggatatgcgcttcatgcaggcgaattcgtccgaggaggaggaagtggaagacgaagacgaagaagatctggacgaggacgagatgatgatggacgaggacgacgaggaggaggagacgacgggtagagcgacgatagttagaggggaagggccacctcaaagatatgattcctttgaaagggaggagtcggatgaggagccgatggacgtcgagcctcaattcgacgaggagctgccgcctccaagtgactggcagtagcattgtatcaatagcatacactaagccgatccatgttgctccatgatagcggcagacaggcgatcctctcacagcagataagcaccagcaagttggtacttgctgccgcccttggtcgggcttacacgcacaggcaggtgagcaagcagcccagtatcagatacggctgcgcaaaccaagcaatgcatgtgctttaccgcttcaacgcgcgtgtttagaggggaactattttcgccgtatatgcattgtactgcggtgccgtcaccacggtctacaacgcatgtgtgctgggctgggagctgcagttggcattcttctcatgagcaacaagtcctgcaagtaaactcgtcggcatcgaaaagtaccagtcagcgctaggttgaagcaagtgagaggttcttccgcctggagcttccatgctgcagtctcggtatctctgcgccaagggccgcaccgtagatcggccttctccttgtgcctcactttccgattctcctggagacgcgcaagggaagcaagacaactacgaccaagcgagcaaaatgctcttccgcatgacaagcagcatcgtcaaaaccaccgtggaccacccgacggcgctgaacacgctctcgaaatcgctgtcagcgagcctgggttagctgcgttcgctcttttttgcttttgatccaagcagcaatctaatcttctacgtgctcaacttaactagccgcgagtattcagccccaccagcagcaccggccagcccagaaacccaaggacagtcgcgtgcaggagcccacccggtccgtccccaccaagagaccaacgcgcccttgattcaagcaagacaatcctgatactcgagcacaacggcatcgacacttaattttttttcctatgcaagtcgtgaccaagaccgtagctcatctttaaggggaaaccactattgtaaactccatacataatgctatctgttgtgccacctactagtcatctatccggtatgcaacaaacagtcactgtgcaaggcaaaacaactttaattttcaactcaaatacgtcgtgctggccactccaacgtcgctatggcttctccacgcagttctccatcgttggtcccgtcatctcgtaatgaaaaactagtcctggccctgcttgctctccaagtactcgtcaactgcgaacttgaagcagttccagcgtggtactcggagcttgccatcgtcgtctgtgtaatacgcgaagacgtctctgagcttgatcttggcgtatttgtactcgatttgctgcgctgcgtcccaatacgagcccacctcgccaatcttcatatcgaacagcccctttatgattgataaatccgaggcgcgtgggaaatccaccctgcctaccacataagcgcggttgtatttgcccttagcatcgtgcgtcggttcgccatacagcgggaagcaccaaccataactctcatacaccagccatcgatcgagaccttcgacagattggatagttggggcagctgatattccagtagcgtccgccatgatagctcttctccttcttctccttcttctccttcttctctttcttctttttcttttctaaatgtgttcttcaatcaagaaatcttctcgtttgtcacacaagtgaatagtgacatcctcaacaataataataatcgccgccatttcatttcatttcgcacagtgatgaaggtggaagagggtcaagaggacacggcgcctgccgccgcgacgacccccgcgtcggcgggcgagacggcgctgtcggagatgaacgcggcgttcgcgagctgcctgtcgctggtgtgtccgcccatccagtacccgccgcactgccgcttcaacccggtgcgggacgcggccgacacggcggagatcgaggcgcggctcgaggagttcttcctgcacgccaagcagctggagcagctgttcctgaacgacacggcggacacgctggcctccatgagcctcgaggcagcggacgcagacgcggagctggctgcaaccgccgccgcaacagggcgacagcagcagagcgagctggagctggagatcctcaacctcgaggcggagctggccgagaagagcgacctgatcgacaagtacacggacgtggtgcgcggctgggagggcaagttcaagcgcatggaccaccgcatgtcgcccgacagagagtgagcgagcaggtggacccttaattaaaagatacttccttcttagagaggcgaaggaatggctgcatgttgtggatagtatttttctgctgacgtcgtaagccgtagaccataacggtgcatacctgtgatgaactgatgtgcaggcagcttactggagcggctcccaggccttgagcagcacggcggtctgctccgggctgcggacggcgatgcgcacgtaggtggggaggttgtagccgggcttgccgctgcgcacgggcacgccgtgctccttggcgagcttgcaggcctggtcgcacgtctcgacggacttggtgtcgatccagatccaggacaggaaggacttgccgaagaactcccacgtggggaagcgcttggagagctgctcgacggcgttggcgcgccacttgggggtcacgtcccacgtctgctgcaggtaggcgtcgtccttgaccacggcggacacgaaggccagcgccatcgagttgacggaccacggcacctgcttgcgcttgatctcggcggcgtgcgcgggcgtgggcgccacgacgctgccgatgcgcagccccgtgcacgaccagatcttggtccagctcgtcatgacccagacgttgatgcggcgggtctcgctgagctgctgcacccactcgcgctggtggatgagcgagtcctggcgccactgcgggcccacccacggctgcatgctctcgtcgatgatgatggtgtggtcgtcggggcagtgggtctcaatgtagctcttcatctgctccacgtccatgtagtcgcccgtggggttcgtggggttcacgaggcacgtgagcgcggccttggggtcgttccacgccagcgtctcgcggccgtcggccttgctcgagcgctcgtactccttgtactgcgtcagggtgccgccggggcgccagccgccgggctgcacgctgcggatcacgaggtcgatgagctcgctggcgccgttgcccatgagcagcagcggcaggtcctgctgccacgtctcgggccacaggaactcggccaggtggctaatggccggctggaagtccgcgggcgggtagtggtgcaccgtgctcatggcctgcgtggccgcggccagcgcctgcgcgggcgtgcccagcgcgttggtcgtcacgctgaagtcctcggcgaagttggcgaggaacttccagtcctggccgccgtggaacgtctgcgtggccgagtcccacacggccggagcggaggaggaggacgaggccatgatcttctcttgacttgctgcttgcttgcttggtgcttgggcacgtcggcgaatggtcactgcctgcgtcgcgtgtttgcagcacgtatcgtgatatagaggaaagatagggtttgatagcgttttgatgtctttatatgcttatttgtctgtatagtgatcatgtgcaagaaatgaagaaaatgatatcgaagtggagaggtttcgctgctagttttttttcttagcaataatgcaaggaaccagtgcttgtttttctttcttatcaattcaagaaatagtagtgttcatgttggtgctgttagcaccttggcggcattactagaggagcaatgcatgttcactagaaaacttcattgcaacctcggctttgttgttgctgagccccggatagtgcgcgtggaaccattttaggatcctttcgacgacgacacggaacacccacgccccggagaacgatgttcatggagccacatgatagtattcatgttgccactgctggcagcggcgtccatgtcacgacttttgaacgagtaggtgacgtgttcgtacatccatttcaacacgtctaggtggccgcatccaggggcagccgcaggtcttatgaatggtgcgccttggtagcacttgatggaaaacattttcatatagccactccaccagttctaggttgccactgctgaccgcgctagagtcagggcgaatggtgagcagcatacgtgatgacaactttactacctccaagtgcccgtttcgggcagctccctccattgctttcgtcgaacacgttaagaggttcttcgagtgcagccattccagcagtttgagttgtccattttgggctgcattgtcgaggcttcaaccgagcaatctacttcttctttgaccgtatgcagccactgcgcgatgttagtaaggtgtccatgcgcaacagctttactcattggactgcactccatggtacacgtatccgttcgtgcgccaaatatccactgcagcacctcgaaatgtccgtgttgcgccgtcaaacccaacagcgctaggtacagttcctacagctaagctaagctaaactaagctaagctttaccaactaacatgaatagcgaggccgcatcaggggtcggccagcgatcacctacgagttttagtcaaggtccgctccaatatccaaagtatcaccatcgtcagtggaacgctagaagatgtcgttcacgtagaagtaacctgagctgaataagtgattcgagcggcggttttaattaggatgtttgagtttatcaatggcggtgaaaagttagctagccaatcctattccagcattcgcgaagcccttgcattgcttagcagccaatcaacgtcactcaaccaccacttccgcgttaatgtaatcggctcattcattgcttgttacaagccgcaacattttgttaagtcacaggtcgaagagctgccagtaaattgtaactaaaaaaacgggtatctttctttccgaaatacggtattaatacttaataacttaaacaattaccatacatataacggcttcgaattgctagcacagccgatactttcgtgacttgagagtccttggccaactttttgatcgattccgagttgcttaacgtcttgacaagagttgggttgctttccactgccgtctgcatctttttcacttcgggcatcttctccaacgtgttcactatttccgaattctggcgcggactaccgacgttgtttctaaggccagagttcttcctaagaagtgttttgaatcccgtggcaatcgaagtcatccttgcgctccgactatgtaaactcttcactcttggcgtcgttttgcccgtaagtacgcggtggctgctcgtgtgggagacactggactgccgcttgatcgcgacaataggattaacgttggcagcaagtaccaccagcaacagtagaataaggcaagtcaggtgcatgctttcccttttttaagacttctccgctccactacatgaatgtattccgttatgggaaatgtggactcgattccgagatggacttgccaacgagccagactctagagacggatttggaagcacagcctgtcctgaaaatctttctgtgcttgagctcatcatcaaatgcgttatggtcagcggacgtaatcgatgtcgcctgcatcgaagtcgcatcggtactcctccgtatctgttgctgtgattttgaggggggggggggggtaagagatcatctatttacgtttaacgagaaactatagagtcctggaatcgctgtagggtgttccgaatcgaataatgatcctgcaaccccttttcgctactactggtctcgttctctaacctggttcctgttgctgtgattaacagagtagcatcggcggcttgagacccttctaccgtgggtgttcaagtagtggcgaaagttttacattgctgaaggcaagcaactttagtccccactggtatttttgcattacatgtactctatccgctgcatctaccggggcaatgccgggcgccatccaaaatttcgttatgacattgcgagaagtattcatatggagattgctgctgcgttggcgacaaacatgacatcatgttttgcgttatggcagccaaagcatgcaacgcttatacacgcttcaaagtcccagtcggtaggtaactcagccaattagaacggtcgaaagaggatcatgatccgagcaatgctcggcgagcatgatccagttaggaaccagcctcacttttgaaaaggaacagacatcaacacgcccccccaatactccatgaacttcaagacctactttgcagtcatcttggccgtggttgccagctccatgtccgcaaatgccgcccaatcctgcagcggtatcgcgtcctgcgctggcgtcggcacgggcaagatcgagtcctgctgcgcttcgatcagtaagaccgtggacttcggccattgctgcgacgagagttgcaagtggggaactctttgcccgtaactcttcccgacactgacccaaaggcgcctcgcattttaattttttttttcaaatttcagaaagattagaactaaattatactttcgaacttctggcaaccaagagtcagtgccacacaaccagaatcaccccgcatccagcacggcaccatggccccccgcacttcccgcaccacgtacaccgcccgcccgggtcgcagccccctcgccacacccagcccccacgagtattatgtttcctccaacgcgctcttcactttcaactctgtgatgagcgcgtgcgcgacggagaagggcgcgctggagtgggcgcagcgagtgggacttctggcaagcgcgcctctgtgtcctacctgcaccaatggcatgacgttgtacgtcgctgtgaagcggacgcgctggagctgctcccgtacggggtgcagtctggagagaagcgtgcgggcctcctccttctttgcccggtcatcagctcccctctcgaagctgatcaagctgctgttgttctgggcgttccagcacccagtcacaacggcagcacagcaggcggaggtgtcgccgacaacggcagggcagtggtatgtctatgtccaggacatctgcaccgccgagatgaagcggacgttgctgaaggtaaaatcgtacattattctgttgctaaatattattttgtaagtagtgttgggttgtattttttaacgggttgaacaatgatgttaaactgctagatcggaggggttgggcacgtggtcgagatcgacgaaacgtccttgaagaagaagcaaaagtaccgacgtggtacccgccacccagacttctgggtcttcggcggagtcgaccgaatcactaaaaagtggttcgctcgtgtcgtttataacgaccggacggagccgactatgtctgctttgattaaagctcacatcaaacctgggaaatgactgtataactgcgtatgatttgacaagatatctaactctttatgcatgtttatcagtactttgattgtctccgatatgtttaaggcgtacgtgacccaagtccagagtgggcgcaacaaaggaaagttatacacccttaccaacaacagacacctgcgtgggatgcggtaccaacacctgtgggtaaaccacacgaaacacttcaaggaccccacgactggcgcccatacgaaccgcatcgagggcgtctgggaggtgaagatcaagcagcgcatcaaagctgctcgtggtatgcggaaaacagtggtagctggctaccaagacgagtgtatgtggcgcacgtggtacttcgcggagaaacctgcaaagagtcacattttccaagggctagttactggcattaggaagtactacgagatctagttaaatcaatacaaactgggatgaaaagttctgaaatttgaaaattttgaaatgcggggcacctttgggtcagtgccctcttccccgaagagcgtctcccttcgacagttacaagcctacctcggtgctcgtctcggtgctcgtcccggtgcggtgaataacgtttcaatacaggaaccatgttttgcgttttcagatttatagctcacggtatttcttacctggaagtagtggactcgttggcttggtggttccacggggctaacgggacggcataccaccgcagcaataacacacgatgtactgaaggctagtggcgagtacgcgacaacatgtcgaaacgttaccgatggcctttaatgcctcgactgaactaattgcaataccaatattgccaatacaacttggctcaatgttattttagctataagaagaaacacacgcattgctaagttaaacaacgcaacaagccttccattattgagtgactctgtgtttttcaggaatcttttagctatagcgtgcggattgcgtgaatattcgcagttcaaagaactgtcgattggggaaggttgttggatgacatcgaacgacattcacgctacattcgtcacttcactcccgtgcggatgaaatcaaacaacattcacacaacatcatccagaactcaatagaattcggtctgaattacacttacagcttttgatagatgcctattcgcctcggagcttcttttccttctagattgatgccaggtgccaccagaggagtggagctccagcacaaacattttattgttcgaaagaatgcaattcttgctattgcacagataacgttatgtacatgtacgttgtccgtcacgaccaccgttctcaaattgcacaccgccgcactctgatgcgacgtcaattatatgcgctggccgcacacagactttgtccggatcgcctgaatatctaacaacaacaaaaactcccagcttcgattcgtccaattgtgttattgccatttatcaagtattaaactgaacgtgccgcattcatgtagcattaggatgatctgaactaatatcggtaacaatgtactttgaagttgttttaacaagaacaggataaagtagaagattattctacagtagtaaatgggctcggtggatctctgcgggtcgcaatgtacagcttatgcgaagttgtagtggaatgttttatctaatccatccagacacattccaatgcgtgtggggattcacacaatatcagcctgccgacaatttaagtcacggcaaacttaggtgaccaaaagatttttaataaatctctatgcatgcagaagaaaatctgtgtctgaaagaggagggtataagttatgacccaggactgaacagattgaatcgatagctttaacactaatgaaatgagtgagtactatgttgagtgctgtggagccgcatgcagtttaatacgatgcagtgatgtggtaatgacaccagttgtgctcaaggtcagcatcgaggcttctaattgtcacagacgccattactacgacgaacaacgtacatgtacataacgttatctgtgcaatagcaagaattgcattctttcgaacaataaaatgtttgtgctggagctccactcctctggtggcacctggcatcaatctagaaggaaaagaaactccgaggcgaataggcatctatcaaaagctgtaagtgtaattcagaccggattctattcgcagttcgaagaactgtcgattggggaaggtttttggatgacatcgaacgacattcgcgctacatttgtagcttcccctgccggcggatgacatcgaacgacattcatgctacacgggaccatcggcacatcatagatagataaaggatattgaagccgactagaacaaataataaaggtgcaattgtgtatattatagctatttctaagctgtgagattccgaacactgaagctcgacaagaatgcaatgatttctgttttacaacgactgggcttcgacccaaattagtgaatgttgtttgatgtcatgatctgctatgagtcataacttataccctcctctttcatacacagctttggtgtactacagcgacggtgagtgcaagacgagtaacttataccctcctctttcatacacagctttggtgtactacagcgacggtgagtgcaagacgagtaacttataccctcctctttcagacacagattttcttctgcatgcattgtttctcagagagagatattaaaattgcgacgcttgcttacatcgtcggatatctcgtagccaagtaagtacttaaaagtaaaacaagcagcagactccgcgcgcgcaatttcccgttaacattagcaaagttgtgctattcacattgggaaggtttttggatgacatcgaacgacattcacgctacattcgtcacttcacccccgtgcggatgacatcaaacaacattcacacaacatcatacagcaatcgatcgaatcggtctgaatgacacttacaggttttgatggatgcctattcttttttttccttctactgtagattgatgtcagatgcctatccaaacgtgcacgctgtcatatattattgcttcctacaaacatcgttgttgttatcagcgatgaagttgaagcacaataacactgaagtaagaaatgctttgggataatgtgcagagttgatattcgacaactgttatgggtctcgagatagttgcacccagtttacgacttgatctaatctttcgtaagatattaatatattcgctggaagtggaccagtaggtactgcccagtacgcactatctcatattggctcatattattataggaactcggataattgcagatctaactacaactgacaaacggcttccccagccccgcgagaagagcaatagaagtcgtcgggacgcacttaaagatgagtaagataagtagagtcgcagacagcggacgtaacccattatgtccacatgctgggtttgtgataatcggtatgaaaccaaccgcacgtcctgctccgatatcagatactgcagtaggagatatcatctaatatattagggaatcttatgcaccgcaaggtcccgattcgcagacctattcgtcgtgactttctctacaaaaatagctaaatatatgacgcaggctataagcctcgtgaatataccctaagtacctaaacgtacttaggctctgggctaaattgaatacttacacaaatcgcaatgttcttttttaaaatcataaatcactcagctagatgattagctgaaaaatattgatctaacgagctactgttcccttttcttgtccttactaattttacaccttagcctggtgctgggttaaggcggcgatatcggtgtgatctcggtcatgcttttacgataccgcatcaagcccacggctccagcggttgatgctgataatcgcgggggtgaagttacttataagtcactacatattatttatttaaaaaagagtggctgcagcgcggcggcgaagaaacccaccgcgcgccacagcggcgagtgtcgagctccgatgagcggtcgacgaacagccggttctgcacctcctacaggaaatgacccggcagcgacatattctcccgttcgcatcggtgaagaagccgccagcctgggcaccatatggagctcgaggttacggagctcgaggtaccaaaaataggcaaatgggtacatggacctaaaattgaatcaccctaaattttggtcggttttctgatctaagaaaacagtccagataattgccgctagatgtccatcggcaaagtaccatcttaattgtttataaaaactcagactgttgattataccaaatacttagcccggtgtttatactggaagcgtcgatctgcgttgtactcaacagcgtttaattagtcgaacggataattttcgtcttgatcctggcccgacaattttattaaggttcgatctgttcaacttaatagatctacagttccgagtgtcatcacttcaacggggagagggggtttctgttgcggcttcaaataatcagatacaagcagctttattgcaatcccagaaatattatttgttagattaatgacaaggcattagttgctgcgtaaagaagtaggccgtgaagtaccaccttttcgttatttcctcagtaaagtgagtatgctgacacgtatatgatagcaagcttggtttgcatgtagatcgcatcgaatttccattttcagccattgctacaagtcgagctggaactcatgcagtccaaaaatgcacctcggttcaaaatgaaagatctttacattcttcacatgctttccttagtttaacccgggtatgttccagcaggaatacatcgatgtgcaggaatgtatagctttattgttcaggtcggggacatttatttacaagtacctctgaaacactgctggcctccaattcgtagatcaaagaatctggaggaatatgtaatactgacagctttcggaggacaataaaggtggcgctagataacagtgcgacattatgcaggctgaccttgcttagatctcacagctcagcgagaccaaggatggtgccaacgcctctgaatatgaaaaaaaatgcagatcgtggcagaagttgctgtcatgttcagattttttccacaccaattcgtcctcacacggtggtagtggctcagcatcgaactcgatgcgccctcaagttggcccatcagcgaccttaagcttcctgcatatccatcgattgcaagtacagtgcagtattgttttagcagccgtgccgcatcgtgcaactttccagactaatctcaagatcagcaaatgtgaaaatttagggtgattcaattttaggtccatgtacccacagttagtgctgtttgcaaacgcgtttgtacgtttgctgctctatcactagcagatcaaattaatggccactggtgcccgttatcgaggggtcactaagaacatttcgcggacttttgagctaatcaacgtactttccttccttccttcctgccactgaaatgtgcgctgatgcctaggcagaacctttttccgtgttttgctcggaaacttaccggaggagacaaaagaagaaaaatccgtgtatttgaagatttagcgctgccaggctaactgctcaactgaacctgctgggaaaacggatgaagccagcaatttgtttcaaatttgatacgtcaaaactgaggtctagcagatctcgatcgcctgcaggagcaggatacaccgggtatttgcccttcgctttggtactgtccgcttgggcttcctctcgcgcaggaatccggggcgtacagcgacgacgtaacttagaagcattcaaacgctgtttgatacaacatggcgcagtcacacacatatttcgtccgggtcgcctgaatatctaacaacaaaacccgtgtctgcttcaattcgtccaagtatgccattgccatttatcaagtattaagctggccgtaccgtattcatgtagcattaggatgttctaaactaacatcggtaacgatgtacttcgaagttgtttgacaagaacaggatcaagtagtgcataattgtattaatacaccaccagtagtaaatgagctcgggggaatccctgctggtcgcaatgtagcctcacacaaagcaagaataataccaaccaaagtctttctagataaaatgcctgagcgacagcagctaggtttttaatggacccacatgagccattcctagctcgattaatttgaactaggttccttccagtttcatacacggtcgtcattctttttgcgctagcttctagccttttctccggagaagacataccatcgggtgcagctctttggctctctgttagatagcgtttgcgttggatacaaaatcgttgaacggaaaactcaagatatacctcccattttggatcacataaaaaactacttcaattatcgttaaaaataattgaagtagtttttggcgaagtctcagtggaatgttcaatctaatacacctaaacgcatttcaatacgtgtggggattcacacaataccagcctgtcaacaatgtatgccacgaaaattgcacaagattttcagttaatctctctgattaactatccatacagaagagaatcgatcgcaaggtgaagtcatcttctcgtgtgtctgaaagaggagggtataataaaagttatgacccatgacagaatgaaaaggtcgaattgacagtttaaatgctcgagttacggtagcatggccaacgcaaaatcgaagtaaggcccagtcttatatctccccgcaatcgcgggacgaggttgggatgagttcggttattgccaggacctccggcaccctggcagtgtgttagagatgcagtccgatacattggcctttcaattttatgtatcccgcggcccgcgccacacaacatcccagcgggacaagagggggtgtcgtccctaaagcgtcccgcttcgacccgcaacaaagagctctgattggtcccatcccgcatcccgcgagatacaagactgggcctaattcggaagtagtagtctgccctgcgaaaaatgccccaaacccgggacacgatatggcatacacacaacacgcagtgtcgcttttttatgcaacaaaagtttatacagtacaacgtacgcccagacgttgtgcaaacaaattgaattattcattccctgctcttcacacatcactacaggaaatcacctttcactggtgtgtcgacatttgtcgaatctgtcgttcgttgaatcccctcgacaggaatgcgaacgcacatgtagttcttctcgcccagcgtgagcgcacgtgttttcagggtgaatgctgcactatcatcacaccgcggccatgatgctttcgtatgaagaagaagttgattaacaagccgtgtcgctagctttggtaaactgtagtaatatctacttgggcaacttggattttgatgttgaacccaaattcgactacttttctttaggtaaactcactaattttggtcgaagcccagtcgttgtaaaacagaaatcattgcattcttgtcgagcttcagtgttcggaatctcacagcttagaaatagctataatatacacaattgcaccttattatttgttctagtcggcttcaatatcctttatctatctatgatgtgccgatggtcccgtgtagcatgaatgtcgttcgatgtcatccgccggcaggggaagctacaaatgtagcgcgaatgtcgttcgatgtcatccaaaaaccttccccaatcgacagttcttcgaactgcgaatagaatccggtctgaattacacttacagcttttgatagatgcctattcgcctcggagtttcttttccttctagattgatgccaggtgccaccagaggagtggagctccagcacaaacattttattgttcgaaagaatgcaattcttgctattgcacagataacgttatgtacatgtacgttgttcgtcgtagtaatggcgtctgtgataattagaagcctcgatgctgaccttgagcacaactggtgtcattaccacatcactgcatcgtattaaactgcatgcggctccacagcactcaacatagtactcactcatttcattagtgttaaagctatcgattcaatctgttcagtcctgggtcataacttatgccctcctctttcagacacagattttcttctgcatgcatagagatttattaaaaatcttttggtcacctaagtttgccgtgacttaaattgtcggcaggctgatattgtgtgaatccccacacgcattggaatgtgtctggatggattagataaaacattccactacaacttcgcataagctgtacattgcgacccgcagagatccaccgagcccatttactactgtagaataatcttctactttatcctgttcttgttaaaacaacttcaaagtacattgttaccgatattagttccgatcatcctaatgctacatggatgcggcacgttcagtttaatacttgataaatggcaataacacaattggacgaatcgaagctgggagtttttgttgttgttagatattccggcgatccggacaaagtcagtgtgcggctgcgccatgttttatcaatcagagtttgaataatcctacttttctgtacgccccggattcctgtaagagaggaagcccgggtggacattgtcaacgcgatggacaaacacccggtgtatccaactcctacacgcgatcgaaatttgctagacctcagtctaaacttatcaaacttgaagcaaattgctggcttcatcgggttaccctgcaaattcggttgggcagttagcctggaagcgctaaatatttgaatgcacgtattttttctgttttttcgccgcctgtaagtttccgagcacaccatgcaatctaagaaatataggattctgcctgggcatcagcgcacgtttcaaaggcaggaaggaataaaattacgttgattagctaattgttgataaccgttctactaactacaaaataactaaagttaaaactaaatccgtggagtcctactccaacgagcaggagaaggtagaatcaccacgttgggtttgtcaaacccaagagttgaagcaccaattcgttggagagaactggcaatgcctttgaaaagatgcaatcaaacttggtacacttggttgtacagtagtaaatgcagatgctgcggctgcgaagcacgcgcaggagatgcccgagtacatcgtttccctgtaagggcatccgtacaagctagcttataactgcgagaccccccgggtccaccaccctggtccccataatatcgataagtgcatgcgcttgcaatacagcatgatttgatattttggcgcaggtcttcttttcttgggactcgtcaaacccaacagcgctaggtacagttcctacagctaagctaagctaagctttaccaactaacatgaatagcgaggccgcatcaggggtcggccagcgatcacctacgagtttaagtcgaaggtccgctccaatatccaatgtatcatcgtcgttagtggaacgctagaagatgtcgttcacgtagaagtaacctgagctgaataagtgaccctaaatagtgcgaatgattcgagcggcggttttaattaggatgtttgagttaatcgatggcggtgaaagttagctagcggtagtcaatccttcacgaaaccctagactctaaagtgatagtttgcaggaaatgcaggaaatgatatcgaggtcgagaggtttcgccgctagggatgcattgatttacgtgttcgcgttggacctgtgttggtagctgagaaattcatatccccaaagctgtaacctcattcgttatcctgcgaccattgccgagaaacaccaacttgcaggcctccacttcaatcatgttatcccgaagccacagtcgagtatttttcgaacagtgttaggccaagccccaccataaaacttctcgttcattttcatatcgctcctcaatgataaggcgttttggacgtcctcaggatacccactagacaaggttctctaaaacgaagtatttccgcatgatcgtgctgacgcgagtgccctggatgggacggtcaagcgttgtatggaagctagaacggttagacagtggcacaaatagcgagaaaccgagctaatatgaaaaagcaatcaacttgttcactccagtgcatattcacgactgaccctacttccttaccgcgcacggagcctgacagctcgtgcttccttcttctttcggctctctgtcggctcacgtgccgacttcaacacgtcaccggctcacctggctctcgtctcaccccttcgtccttggctcacctcacagctcacgtcctgagccacgcggtgctcgtgacctccgtcctgcccttcgcgtcactgctcacccatcgctcgcgtcactgcttccatcgcagccgagcgcgccacctaaccgacgcgtcgccagtcagcgcccctccgaaatggatgactgcccgctcaccccatcgtcccacagctgatcctccagaagtcgatcgttggtcgaacggtcgtccgtgtagtaggaacggtggtgaccgttcctactcgggacatcctccccgactgaaactcgacgtcctcgtcgagcagcttgcagcttgtcggcttgcattttggcacgcagctctcgctgttcggcgcgcaacccactgagcgtcctcacgggtttcttatcgcctacgcagccgtccgcacgccagaacgcttcgctcaagcgctcagcttgctccagctcttccaagtcttgctgtcattgcgagtagcggtcctcggccatcttcaagggcgaacgcccacccgaagtcgccccataccatttcagcaagtggctggccacgcaggtcgccaccacataacaactccaccgcactaccgtctcgtcgggcacgagtccgtcgccgacgactagacctccatcagccaatatgtagttcagcgtcagcaggagcactgcgacgcccaccgttccttggcacactcgctccacgaagtcgtacacgaacacgaccgtgtagaagagggcgtaagccagcaacgacacgaacgcccagaaccctcgacacacacagctcgcacggtcgaccgtccgtctgcactcggccttggaccctttccaatacttggccgtcgatttgcagctgagctccaatacgtcaggcaagaagacgcaccacaaggcgtgatacgcttccaaccacttgtgtagcagcctgccgaggccttcggtgtgctctccacgagcctccaacacgatcatgggcgtggcccaaattgcttcgaacgctttccatctccgttccgccgccggtcgatcttctacggccggaccgttcacaaagcgacggtagcgcctcaggcacacccgcgccagcgtagatcacttgtagacgaaggcgaagatcgcgacgagcagtcgacccgcgatactccacagcggcctcgtcaccactccgccaatcgcgccaacgaccaacaaaacggtcacccaccaatatttgcacagcaccgtgagcgcgacgcgccacagcaccaacgaactccaaaagcacttcaatagtcgtctccatctcgccaccgtgcgaaagttaaaatacagcccttggagcagcctgagtccaccgttcctgcctacttgcgaggtctgcagccgtcgcactcagcacttcggtagatccagcaacccaccgttacatttcgtcaattcaccgtgtttgacacggccgtgtcgctcgtcaaccgcgtctctcccttccccgaaaggaaatcacagaccttcaacttccaacggtcgagtcgttgtccatcagtagctcacgctcattggcttcttgtcctcctttcagcttttgccgagacaaccgcaagacgcccaagaaccccaccaccatgaccaagcctcgccacgagaataaggccgccatcatccgacgactgcgctcgcacttggaccgcaagacgcgcggcgccgaggccgacgcgcgactgcgcgcgcaagtcgacttctacgcccggctgcgcagctccagcttcgtcaacggcgactcgcttggcgtcactgccctcgacgaagtgcccgtggccgtgttggccgacgacacgctgttgcccgcggagctcgcgcgcacggtggtgctgttgccagcgcccactacgatggacacggagcccgcgcccgcgcacgacctcttcgccgttcaagctgttcctgcacccgcggccaagcgtccggccgcttcgagcgctgatgaccagaagccccccgccgccaagaagcagcgcaagagctcgcgcaccccgcagtacctgttcgacttgccggacacctgcccccgcgacgttcagcgagacgtcgagaagctggtcaaggccgccgccaagcagggcaagcccccgccgcgagcagcgtacccctgggccgggcagcgcgcctggtatgacccggaagagtttccggagctccacctgatgcactggcgctactacatgcgccaccgagacacgttcttcgactgtgcactgtacgcgccaacggacaactcggacgctcgccgccgcgacaagctcaacgcgaaccaaggccgcctcgtgttggtgagcgcgaacgtctgcctcttcggctggtacggcttcctcgaccgtttcgagaacaccgttcacgacaatctcatgtggctcggaggcaaggccgccaagcgttccgtgtcggccaagggcaaggccagctcggcgacggccctcgtcacgctgtggcgcgacgaccattcccgctacgacagcctgatgactcgcatcctggatccgtgccgcgtcgacgaagacggttaccagagcatcggtgagctgctggaacagacggaggctttggacccgactcgtcccccgcaccttcgactcagtgacgaagctctggctcgcatcgcgctcgacgcgggccgcaagcctcccaacccggcctggatcggcaacaagagcagcggcatctggaagacgctgctgacgaacagccggattcgcgcgctccaggtcaagatcgccaagcagctcaaggagggcacgtacagggtcgtcatggacttgaagccgttccagcgcaaggagcagggcgacaacgactcggactacgccgccgccgacgacacgttcaccgtgcagccgccgtctccgcccgtcgacgaggagctcgaagacgttgaagacgatgagtccgaggagaagccgtctacgccgagccccacgcaggaagacgagcccgacgaccaagagcaggacgacgccgatcaagacgaccaagccgaagacgacgaaggcgaccgcagatcggacacccacggcgcccccgaagacgacaagaagagcagctctggcgacgacaagggcgactcgtcggccaagagcaaccccaagaagaagagctccgactcttcgagctccaagtagttctccgtgaatcagggacgctcctgaccgttcattctttccgtattactccgtgcgtccctccaattaatctcaataacaacatgcaaaccgttttccactcgttccgttcttgagtcttgtagttcgaccgttcataacatcactccacgaccgtttctccaaaacacaaacgcttccaccgttgaccgtgctacgccatcagcaagtcatcatcctccacttcttcgttggcatcggccagccgcgagcttcgacgcaactcgggcagccgcaacttcttcctccgggcttgttcaaaatccgtcactagggcctcaggcatcaactcggcccgaggcacccaaaacgtttcataattcgcaaccaacaccaggtactccacggaacggtccaccgttcgtttcccacacactgctaacaacggcgagtcgacaccagtgaggactgtgtcccccttaccaacggtcagccgttccgtgaaactcgacgtggggaggtcggactcctccagcggcccatcttcagcctccccttcaccgttttcgacaccgtccggcacgtcatccatgtacggccgtgtccacttgccacgaaacttcttcaaacggttcacgttgaccgtgaccaccatgtcaggatgcgacgggatgtcaatccggtacgcattatcgcccactttcgccacaactcggtaaggaccgtgccacgcgaacgctagcttcttcgtccgagcctcccctcgcttctaacggaacagttgatacacccacaccgggtctccaacctcgtactccacggctacacggtccaccaaccgtttttcatgacgatcttgagccttcaccagttgacgctcgaccagatgacgagaatcccgcagcgaccggtataactcccgtcgatacagagccacttcgttgctcttccacttcttccccaggttcaggaacgcgacgtccagcggtagcgtcgcatcacgtccgtagagagaaaagaacggtgtatcgcccaacgcctcatgataagacgtacggtaggcaaacaacactcgaggcaaatacagatcccagtccgtttgcgcttcactcacgtgcatcttgagcattcccatgagcgttccgttgaaccgttccacgagaccttgagtctgcgggtgataggcagaaccgaacagcttcttgatcccgagcgtttgatagaacgacttagcgatttccgacgtgaaattccgaccgttgtcactcaactaccgtgaaggcacaccgtgccgggacacaacaccgttcaccataacgtcaacgaacgtgacggagtccaatcggagaactgcgaaggcttggcccatctcgtgaagtagtccacgaatacaagaatgtacttgttgcctcgttcagtctccggtgacggtccaacggcatcgaccactagcagcgaaaacggtcccgtgagatcggctacgggtatccgttgcatctgcaccgcttgccagggtctcgagcccttcccactaccacaacggttgcactcccgaacgtactccgtgacatcctttcgccatcccggccagaacgcatgtctcctcaccttctccagagtcttcttcaatcccaagtgagacgacagaacgtcagagtgacagtagtgcaacacggtctccacatacggtaacggaaccaccggaacggtcaaagaccgtgcaggtccgacccgagctggtagattcacgcaccgcatcaataaaccgttccgcacttcatatcgacgtcccatcttgacaacagtcgttcgcaggaaggggtcgagaggcaaggcaccgtccaacaggaaagccacgagagccttgatccacggcacctctcgctgcgcttctacgaactgctcagagtcgagtccgaaccggtccacaggggatatcggcgcgtccgtttccggaccgctgccaacgtcctcttcggacggtcaggttcgtcatcatccacatgtccatctgaacgctcgccagcaacatcctcaccgttcgcaagttcaccgtttgtaccaggctgccccccgactgaagccggaagcacgtcatcgaccgtgctctcaggattcaggaggtcgctcatcgtcagagccgccactgtatccatcgacaaccgtggcagaccgtcaacatgacccaaataagcaccaggcttgtgatgaactttgaactggaggtttgagagctccatcgtccaccgtgcaagcttagcgttcgtcgtacggttaccggggctgaacacccacgtcagcccctggtggtccgtgtacaaatcgaactcacgcttgtccaggtagcagcggaacttcctcgttgcccacacaaccccccaacattcaatctccgagatgccatcttcgttgttaatccagttcttctgcgatccagtcaacagcttactagcgtaggccactacacggtcgcgaccgttcggctcttgcatcaagcaagccccaacagcgtaccgtgacgagtccacgtacaacttaaaccgtttcttgccatcaggatagactagtatcggcggcttcaagagcgcacgcatcaactatctaaacgcagcttcacagtcctcgttccacacgaacggtgcgtccttcatcttcaaccgttccaagggcgcggagatcgacgcataccccgggatgtagcggcggaagtaactcgtcagacccagaaaagagcggatcccatgcacgtccaccggacacttcacgttgatcacggccttcaccttctctggattaggcaggattctagtaggagtcacaatgtgccccaggaacgctacttgactacgcccccagtgacacttcttcatcttgagcttgaacccagcctgctggaaccgtgtcagcacttggcgcacacgaatcagatgagtagggaagtccttgctaaaaatcacacagtcatcgaggtaaaccaaacagattcgccacttgagatccaccaaaacggtctccatcaaccgttcgaacgctgggacagcgttgcaaaggccaaacggcatcactaaccattcgtacagaccgtatttgcacgtgaatgcggtcttagacacgctgtccgggtgcatcggcacgttccagtagccagaagcgatatcaatcgtcgaaaacagatgagcgtcgcccaacacgtccagaatatcatcaatcaacggcatggggtaacagtccttcaccgttaccgcgttcaacttacggtagtcgatgcagaatcgtattccaccgtccggtttccgaatcatcaggacgggactcgcccacggactgttcgagggccgaatcaggttcagctccaagtactgctggatctccgcttccatgacttcaccttcagctaacgaaacacggtgcggctgctgcttgatcggagcactgtcaccggtgtcgatctcgaattgcaacagatccgtccgtccgggcttcttagaagagtcaacaaacatgctgtggaaaccgttcagttctccttggaacagttccttctgctccggcgacagtctagactccgagaaatcggccttcatagcttccgctttgtcgggcgggatgtccggcttcgtagctttcaccttctcgccgacgcccacttcgcgcgcttcagacactgacgctgcacactcccccttgggctcgccaccttcggctggcaccgttcccttcggaccaaccgtttgacgctccacacccttcggatcgaccgttggcggctcgaaagccgactccgggatcacggaagtgcacgcaatgaccgttcctttccggatccagtactcatccgtagacgcattacagacttcgacgatggcctggcctttctcgaccgtgcacaacgaccgtgccacgcacagcgtcggagacagacccaaagatccttcgaccagaacggtcgccttgtcgacgacggctcccacgacacgagtcatcacgagagcttggccacgcggcggcaaccgcaccgacgtcgccatcgtcgtcatgtacgactcctgcaccatggtgaaacccagcgtcaacacttcgcccgtactcttcagagtcaacgtccgttctgaaacgtcgattacggcaccgaatgctcctagggcatcaacacccaggatcgcatcgacgtggagacggtcagcaaccaacaagctcatcgagacttcaaccgttccaagacggagagagagggtaatccaaccacgaatccgcaacttgtgccccgaggagctcctcaccaggccctcgtacggttccagcggctcggacgaccgtcctaaacgcttcagcacgcgtcgatccacgagacttagagtagcgccagtatccgctagcatttgagacggtaagcagtcaatataaccgctcgagagagcctcaaagttgccaacagcacacaccacccggcgtccgtcctcaacagcgcgatacacgtcacactcatctccatcctcctcacagagtccaaatccgttgggcaagttgaccgtgacaacttccacgagaccggtccttggtaacggtgtccgagccggaagctcgcacctctacgtaatgagaaatgtcctcttcacgctcagggtagaactccacgtctcccagtacttcggcatacggtttgtacaacgacgaaaagtcaaagcaacccttcttctcaggctgacggcgacggcggcgcctagcactaggcgtcctcgaccgtcccgtacggtcccacagtttcgtccacacttgacccgcgttttcctcgaaatacgacttgatacacggttccaaccgtctccagcaatcccccttccgaccatactgctccacaacacggttgacgtgctcgcgttgccgttcccaatcgggagcaggcaccttgtcacgcaacgggggaacatccaccgttcctccttcaccgttcagcactttttgagaaccgttgtttcgacctccgtagtctctcgcttctttcagcaaccggaacacagcttgacgcgcgatcgctctcttgatcttcggatcgacgcgatgcactccacttaggacaggaatcccttcctccaccgagaccgttcctcccgggtcatcgggagggcgcaagacattctcgcacacgaaagactcgacgaccgtgttaaccacgcttgtgaccgtttcatcttcagaatccgatcgttcggaggagacatcagagctgtggatatcgttgccgacgccagaccgctccgaggccttccccaccgtcccacttgacgcagcttgttcaccatatacgacattcgccaccggagtccggaagtctcggttcgcacgcttggcttcctccgacttatccagcatatcaccgtaccaatcttgccagtactcaggcattccaaaggagtcggaggcagcttggcgcgtccgctccaagacctccagagagatacccaagaagcgagccagctctgccgcagacggttcggtctgagctttagcgttctgctcaacgcgcttcatcaactggacctcgtccagcggatacaaccggtcttcaagctccttgtcgtactcttctggcacggtggcgacatccgttccagcgagaacatacgtctcctgcccgggctcacagtcatccatagcatccagttcttcgtccgtaaacaaacggtcgtacttcgaggagtccttggcctcaaccgtttcgttttcgaccgtcctggcctcgaccgtaccgtccacttccttgctctcagcaagaacggtctcttcatccgtccaagccgcgaataagcagtccgatacgtcgtactcttcgtctccccacacttctaggggcgccaccacttcttccggcggcgtcacttcaaccacggcacttcgttcttcacgcatcacagtaggaggctccgacacagtgcaatcctcggacagccccgtgaccgttgtctccccaccggtcccaacctcatcacaccgttcgggactcgcagcgaccagatcttcgtagaccacttcgacttccttgccttcgacgtccgcaaccaatccttctctttcttcatccgtccccacgatctcgaacccgactttctttttcttgtttttcttttcagcacatggagctccacgcatggcagacaccggttcggtctgcttcctcgatgcattcacacaaacatcaacggtggtcaccgttccgccttccgcttcacggtcgcgatcaccaccactcgagccatttactagacaagaggaaggagtgactctctcctccccttcctcccacccccgtcattggttcgaagcggtttgtgcagacttggtcctcagatcctgggccgcaccccggagtgccgcaatgccaggacacgcaccgataaggtgaccttcttcctcgcagaacgcacacttggtaacgccacggccaccgttccggccgaccgttccagggccgcgttggtagttgttaggtcctgcttcacactccacagcgatatgaccgtgaacaccacagttgtggcacgtcatggactggcgacggaaggtctctcgcgagtgacccacgtagccacaccggccacacacaggcgctccctcttgagctcgactgtcagctcccatacggattcctcggaccggtcgaccgttcccacgaggaccttgaccgttcattccagcgccaggactcgaagtcgtagccgaaacgttgggcatgcggttccgcggcgagcgcggaggctgccagcggttctgcatcatctgctgctgccactgctgcgtcatgaacgtcgtcatcttctccgcgagcacgcccacagccgccatcggatcgttcgcgggcgaggcatcgctcccgctcgacttcctcttctcgtccgagaactcgtcgtcttcttcaatgggacgtgacatctccttggccaatagccattcgcaggcctccggaatgtcacgcgccggtcccgagtcgagacatgccaatatgcgcttgtttcggagcccgcgacggaacagctgatatctcatcttcctgttcggatagtccaacgagtcacaaagatccgtcacacggtcacctcactcctcaacggattcgccacgctcacggtgagcggactgcaaccgttcccagagctggtcagccgttcggctgaggaacaggttgtggaatcggaccttcagagtcgcgaacgtcttgatagtcgagttgttccaccaccattcagcttcagagcccttgatccgttgtcggaacactaacagccgagactggtccgggaggtggctggtgtgagcttcgaacagctcccagaagtcacgcgccttgtccatgctggccgtgtccgagtagaaagcaggtaggaccttgatcgcattggagaccatagacgacaagccacggtcgttccgaacggtcgggttgttcatgggggcacggtagccaccgttccgagcttgggtaggcatcggccgtccgttcgttgaggcacttaccgcagttctgacaggtgctttgtagtgcacgactgtcttcaccggtcccgtcggttgggtcttcaccggtctcgtaggttgggacttcactgtaggctccactttcaccttccgctccatcttcaccgtgggcttcggcaccgttccccaaccaccgtagcctccttgcggggcaccgacgctccagccaaacacaggacctccaggcagacgcttctccgttcccgtgtacaccgggatgaagccacttggggtcctctgctgccgcacttcttcaggttcttctttcacgtagtccgtgtagtaggacggttcgtactcagcgagttcactgtagccgtagtcttccgccgaccagtactgttccgtttcatcaagtcgtcatcctcaccgtcttcctcgaccgtttgcacagcctcggggcccggcgatggagccatcttcatctcgagctcttgttctgcttgagctccgcccgcatcaccgtgttcatctgcggtcttgtgttcatcatcgtcttcatcggcccaaagagcctccctcgtttcctggcgaagcgagtcacgaccggcagcagtagctacctgcgccgccgcgtccactccgctcgcatctccggacgatcgcgggcgtcgctgccccagtagagccgacgtggttccaccgagttgcagccgtcgcaaccgttccgcttccaaccgtgccacttcatcttgcacggaccgctgattcccattctctccttgctctccaacaaccgtcatcttcttcagaaagtcttcttcactcgaccttcagcacgcgatcttcttcactcgaacgcgcgaaacaaactccaatctccaatctccaaacttcaaacttccagacttcaaactacttcaggctccgagcgagccgaccagaattaccggcggaacatagcgttccgttcaccgttgacttgaccttgaccgttaagggctccgagcgagccgaccgttttcttcttgaccttcttgaccttgaccaatgggggtacttcgcgtaccgttctccaatcccacagcggcgccgagcgcaccgttcacacgacacaattccagatccagaccgttcacgcgcccgaggcgaagactgggactccaggcagactcccgaagaccagacgaagctccaccgacgcgaggacttgacccgtactgccgtcgttcagacttcacaacgaagaccgtaccctgcttctccaccacgtgtcgcgagtgccctggatgggacggtcaagcgttgtatggaagctagaacggttaggcagtggcacaaatagcgagaccagagctaatatgcaaaagcaatcaacttgttctctccagtgcagattcacgactgaccctacttccttaccgcgcacggagcctgacagctcgtgcttccttcttctttcggctctctgtcagctcacgtgccgacttcaacacgtcaccggctcacctggctctcgtctcaccccttcgtccttggctcacctcacagctcatgtcctgagccacgcggtgctcgtgacctccgtcctgcccttcgcgtcactgctcacccatcgctcgcgtcactgcttccatcgcagctgagcgcgtcacctaaccgacgcgtcgccagccagcgcccctccgaagtggatgactgcccgctcaccgcatcgtcccacagctgatcctccagaagtcgatcgttggtcgaacggtcgtccgtgtagtaggaacggtggtgaccgttcctactcgggacgttctccccgactgggggaggaggtcccgtcgtgcgtcggcctcggcgctggcgccgcgcgtcttgcggtccaagcgcgagcgcaggcgtcggatgatggcggccttattcttgtggcgaggcttggtcatggtggtggggttcttgggcgtcttgcggttgtctcggcaaaagctgaaaggaggacaagacgccaatgagcgtgagctactgatggacaacgactcgaccgttggaagttgaaggtctgtgatttcctttcggggaagggggagacgcggttgacgagcgacacggccgtgtcaaacacggtgaattgacgaaatgtaacggtgggttgctggatctaccgaagtgctgagtacgacggctgtagacctcgcaagtaggcaggaacggtggactcaggctgctccaagggctgtattttaactttcgcacggtggcgagatggagacgactattgaagtgatcgagtggtgcttttggagttcgttggtgctgtggcgcgtcgcgctcacggtgctgtgcaaatattggtgggtgaccgttttgttggtcgttggcgcgattggcggagtggtgacgaggccgctgtggagtatcgcgggtcgactgctcgtcgcgatcttcgccttcgtctacaagtgatctacgctggcgcgggtgtgcctgaggcgctaccgtcgctttgtgaacggtccggccgtagaaggtcgaccggcggcggaacggagatggaaagcgttcgaagcaatttgggccacgcccatgatcgtgttggaggctcgtggagagcacaccgaaggcctcggcaggctgatacacaagtggttggaagcgtatcacgccttgtggtgcgtcttcttgcctgacgtattggagctcagctgcaagtcgacggccaagtattggaaagggcccaaggccgagtgcagacggacggtcgaccgtgcgagctgtgtgtgtcgagggttctgggcgttcgtgtcgttgctggcttacgccctcttctacacggtcgtgttcgtgtacgacttcgtggagcgagtgtgccaaggaacggtgggcgtcgcagtgctcctgctgacgctgaactacatattggctgatggaggtctagtcgtcggcgacggactcgtgcccgacgagacggtagtgcggtggagttgttatgtggtggcgacctgcgtggccagccacttgctgaaatggtatgaggcgacttcgggtgggcgttcgcccttgaagatggccgaggaccgctactcgcaatgacagcaagacttggaagagctggagcaagctgagcgcttgagcgaagcgttctggcgtgcggacggctgcgtaggcgataagaaacccgtgaggacgctcagtgggttgcgcgccgaacagcgagagctgcgtgccaaaatgcaagccgacaagctgcaagctgctcgacgaggacgtcgagtttcagtcggggaggatgtcccgagtaggaacggtcaccaccgttcctactacacggacgaccgttcgaccaacgatcgacttctggaggatcagctgtgggacgatgcggtgagcgggcagtcatccacttcggaggggtgctggctggcgacgcctcggttaggtggcgcgctcggctgcgatggaagcagtgacgcgagcggctgcgatggaagcagtgacgcgagcgatgggtgagcagtgacgcgaagggcaggacggaggtcacgagcaccgcgtggctcaggacatgagctgtgaggtgagccaaggacgaaggggtgagacgagagccaggtgagccggtgacgtgttgaagtcggcacgtgagctgacagagagccgaaagaagaaggaagcacgagctgtcaggctccgtgcgcggtaaggaagtagggtcagtcgtgaatctgcactggagagaacaagttgattgcttttgcatattagctctggtctcgctatttgtgccactgcctaaccgttctagcttccatacaacgcttgaccgtcccatccagggcactcgcgacacgtggtggagaagcagggtacggtcttcgttgtgaagtctgaacgacggcagtacgggtcaagtcctcgcgtcggtggagcttcgtctggtcttcgggagtctgcctggagtcccagtcttcgcctcgggcgcgtgaacggtctggatctggaattgtgtcgtgtgaacggtgcgctcggcgccgctgtgggattggagaacggtacgcgaagtacccccattggtcaaggtcaagaaggtcaagaagaaaacggtcggctcgctcggagcccttaacggtcaaggtcaagtcaacggtgaacggaacgctatgttccgccggtaattctggtcggctcgctcggagcctgaagtagtttgaagtctggaagtttgaagtttggagattggagattggagtttgtttcgcgcgttcgagtgaagaagatcgcgtgctgaaggtcgagtgaagaagactttctgaagaagatgacggttgttggagagcaaggagagaatgggaatcagcggtccgtgcaagatgaagtggcacggttggaagcggaacggttgcgacggctgcaactcggtggaaccacgtcggctctactggggcagcgacgcccgcgatcgtccggagatgcgagcggagtggacgcggcggcgcaggtagctactgctgccggtcgtgactcgcttcgccaggaaacgagggaggctctttgggccgatgaagacgatgatgaacacaagaccgcagatgaacacggtgatgcgggcggagctcaagcagaacaagagctcgagatgaagatggctccatcgccgggccccgaggctgtgcaaacggtcgaggaagacggtgaggatgacgacttgatgaaacggaacagtactggtcggcggaagactacggctacagtgaactcgctgagtacgaaccgtcctactacacggactacgtgaaagaagaacctgaagaagtgcggcagcagaggaccccaagtggcttcatcccggtgtacacgggaacggagaagcgtctgcctggaggtcctgtgtttggctggagcgtcggtgccccgcaaggaggctacggtggttggggaacggtgccgaagcccacggtgaagatggagcggaaggtgaaagtggagcctacagtgaagtcccaacctacgagaccggtgaagacccaaccgacgggaccggtgaagacagtcgtgcactacaaagcacctgtcagaactgcggtaagtgcctcaacgaacggacggccgatgcctacccaagctcggaacggtggctaccgtgcccccatgaacaacccgaccgttcggaacgaccgtggcttgtcgtctatggtctccaatgcgatcaaggtcctacctgctttctactcggacacggccagcatggacaaggcgcgtgacttctgggagctgttcgaagctcacaccagccacctcccggaccagtctcggctgttagtgttccgacaacggatcaagggctctgaagctgaatggtggtggaacaactcgactatcaagacgttcgcgactctgaaggtccgattccacaacctgttcctcagccgaacggctgaccagctctgggaacggttgcagtccgctcaccgtgagcgtggcgaatccgttgaggagtgaggtgaccgtgtgacggatctttgtgactcgttggactatccgaacaggaagatgagatatcagctgttccgtcgcgggctccgaaacaagcgcatattggcatgtctcgactcgggaccggcgcgtgacattccggaggcctgcgaatggctattggccaaggagatgtcacgtcccattgaagaagacgacgagttctcggacgagaagaggaagtcgagcgggagcgatgcctcgcccgcgaacgatccgatggcggctgtgggcgtgctcgcggagaagatgacgacgttcatgacgcagcagtggcagcagcagatgatgcagaaccgctggcagcctccgcgctcgccgcggaaccgcatgcccaacgtttcggctacgacttcgagtcctggcgctggaatgaacggtcaaggtcctcgtgggaacggtcgaccggtccgaggaatccgtatgggagctgacagtcgagctcaagagggagcgcctgtgtgtggccggtgtggctacgtgggtcactcgcgagagaccttccgtcgccagtccatgacgtgccacaactgtggtgttcacggtcatatcgctgtggagtgtgaagcaggacctaacaactaccaacgcggccctggaacggtcggccggaacggtggccgtggcgttaccaagtgtgcgttctgcgaggaagaaggtcaccttatcggtgcgtgtcctggcattgcggcactccggggtgcggcccaggatctgaggaccaagtctgcacaaaccgcttcgaaccaatgacgggggtgggaggaaggggaggagagagtcactccttcctcttgtctagtaaatggctcgagtggtggtgatcgcgaccgtgaagcggaaggcggaacggtgaccaccgttgatgtttgtgtgaatgcatcgaggaagcagaccgaaccggtgtctgccatgcgtggagctccatgtgctgaaaagaaaaacaagaaaaagaaagtcgggttcgagatcgtggggacggatgaagaaggagaaggattggttgcggacgtcgaaggcaaggaagtcgaagtggtctacgaagatctggtcgctgcgagtcccgaacggtgtgatgaggttgggaccggtggggagacaacggtcacggggctgtccgaggattgcactgtgtcggagcctcctactgtgatgcgtgaagaacgaagtgccgtggttgaagtgacgccgccggaagaagtggtggcgcccctagaagtgtggggagacgaagagtacgacgtatcggactgcttattcgcggcttggacggatgaagagaccgttcttgctgagagcaaggaagtggacggtacggtcgaggccaggacggtcgaaaacgaaacggttgaggccaaggactcctcgaagtacgaccgtttgtttacggacgaagaactggatgctatggatgactgtgagcccgggcaggagacgtatgttctcgctggaacggatgtcgccaccgtgccagaagagtacgacaaggagcttgaagaccggttgtatccgctggacgaggtccagttgatgaagcgcgttgagcagaacgctaaagctcagaccgaaccgtctgcggcagagctggctcgcttcttgggtatctctctggaggtcttggagcggacgcgccaagctgcctccgactcctttggaatgcctgagtactggcannnnnnnnnnnnnnnnnnnnnnnnnnnnnnnnnnnnnnnnnnnnnnnnnnnnnnnnnnnnnnnnnnnnnnnnnnnnnnnnnnnnnnnnnnnnnnnnnnnngggagcagtatggtcggaagggggattgctggagacggttggaaccgtgtatcaagtcgtatttcgaggaaaacgcgggtcaagtgtggacgaaactgtgggaccgtacgggacggtcgaggacgcctagtgctaggcgccgccgtcgccgtcagcctgagaagaagggttgctttgacttttcgtcgttgtacaaaccgtatgccgaagtactgggagacgtggagttctaccctgagcgtgaagaggacatttctcattacgtagaggtgcgagcttccggctcggacaccgttaccaaggaccggtctcgtggaagttgtcacggtcaacttgcccaacggatttggactctgtgaggaggatggagatgagtgtgacgtgtatcgcgctgttgaggacggacgccgggtggtgtgtgctgttggcaactttgaggctctctcgagcggttatattgactgcttaccgtctcaaatgctagcggatactggcgctactctaagtctcgtggatcgacgcgtgctgaagcgtttaggacggtcgtccgagccgctggaaccgtacgagggcctggtgaggagctcctcggggcacaagttgcggattcgtggttggattaccctctctctccgtcttggaacggttgaagtctcgatgagcttgttggttgctgaccgtctccacgtcgatgcgatcctgggtgttgatgccctaggagcattcggtgccgtaatcgacgtttcagaacggacgttgactctgaagagtacgggcgaagtgttgacgctgggtttcaccatggtgcaggagtcgtacatgacgacgatggcgacgtcggtgcggttgccgccgcgtggccaagctctcgtgatgactcgtgtcgtgggagccgtcgtcgacaaggcgaccgttctggtcgaaggatctttgggtctgtctccgacgctgtgcgtggcacggtcgttgtgcacggtcgagaaaggccaggccatcgtcgaagtctgtaatgcgtctacggatgagtactggatccggaaaggaacggtcattgcgtgcacttccgtgatcccggagtcggctttcgagccgccaacggtcgatccgaagggtgtggagcgtcaaacggttggtccgaagggaacggtgccagccgaaggtggcgagcccaagggggagtgtgcagcgtcagtgtctgaagcgcgcgaagtgggcgtcggcgagaaggtgaaagctacgaagccggacatcccgcccgacaaagcggaagctatgaaggccgatttctcggagtctagactgtcgccggagcagaaggaactgttccaaggagaactgaacggtttccacagcatgtttgttgactcttctaagaagcccggacggacggatctgttgcaattcgagatcgacaccggtgacagtgctccgatcaagcagcagccgcaccgtgtttcgttagctgaaggtgaagtcatggaagcggagatccagcagtacttggagctgaacctgattcgaccctcgaacagtccgtgggcgagccccgtcctgatgattcggaaaccggacggtggaatacgattctgcatcgactaccgtaagttgaacgcggtaacggtgaaggactgttaccccatgccgttgattgatgatattctggacgtgttgggcgacgctcaactgtttcgacgattgatatcgcttctggctactggaacgtgccgatgcacccggacagcgtgtctaagaccgctttcaagccccaccataaaacttctcgatcatcttcatatcgcgcctcaactatatggcgttttggacgtcctcaggatacctaccagacaaggttctctaaaacgaggtatttccgcgtgatcgtgcattctgttcttcaaaacgagctttctgaccgaaacggaagttttcggcgctggcatttctggtgcttcctcctcacaaggtttcttcgttatagcaagtgccaaaccacttttgggaaagtcgtgctcgtcgtcagggctcggaaaaataattataatataataattatagtattatattgacggaataacttattattggattttccgggtttccgtaaaatatgatattgtaccaataataagtatattgagttttcaccagatttcagttgttaagacactaaagttcccggttagaactcatttatatgccccaaatgttagttttacggttcagtattgtcccaataatacacaataataattataattattattacgggagcctcaagaaatggaattacggattattttttcttagattcccaatacaattttatattttattttccgagccctgctcgtcgtgggaagctggaactcgttcattctccaaacaggaacccggaggcaacaaaataaatccacactgggtctcagccaaccgggacaataggtctcgatagaattcaactttgaatgaatagtctttggagtgtgttaattgaacaaaacggaccagcattttttggtatgccccgcttgcaggttgttgagcttcttcatttacgaagtgtcaaatttgtttagcagcatcttgtccagatcaatgtcgtctggcatccaagcgccacactccgtctcagaaaaagctacagatttttcgcatcgacacccttcagactgttcgcgtcgccttgatcgtcctgtaaatgtacacgatctccactttccgatgcggaaatgaggggaatattcggggtcgaagatgccgattgacgagaagaaagcaacagattgacaggaaaacacttgagaaatatccgaaaaccctcactcaagcgattaagctacgacgctaaaattgttggctttacgtttaccgatgcgacgtatccgcaccgccacttaggtcgtgtgcaagaaccgccttcctgtttttggaggctggcttccgcatgtgtggaaacgtatcgacgactatttgtctggcagcatgggtcacgaagctctgagcgctgcctgcggggctggggcctcgaaaaacactttggactacctattagagaagacggcacctgactggagggaggccgtggaaggtgccgtgtgtggagggcaaatgcacgtgctctgttggatgacggagcgtgtagacggccgtggaccctggcaagaagattttgaaaacgggctagaatatgcagcaagccacggccacctcggtgccgtccagtggttgttcgagcgctggcacacgcaatggaacactaatgaatctatggcggattacaccgacaaggcttgctgtgtggacggtgcaaggcacaggcattgctgctggcagcggaacacggacatttcgaggtggtgcagtggctttatactcgaacggatttgtgcagcgggggctatagcccaatgagtagagcagtcgcaaacggacatcttgccattgcgcagtggctgcactctaaggacacagacgaagagtgctctagcgaagccgttgacgaagcagctgggagtgggcactgcactggctggaagcgcaccaccttttcacttgtacgaaggacgcaatggatggagctacgcaaaatggccacttggacgtggtgaagtggctacaccgagttcatcacgaatgctgctcatcagaggctatgagtctagcgatccgatacggtcacctggagttgctcaagtggttttacagcaacgttcacaacaaatgtcaccgtttccacccaccaatgattttaacatttgcggatagagagggtcatttagacatgctgaaatggttgcacgcacaccttcctaaagccttctcttgcattatgatggacacagcggcaaagaatggccacctggatgttgtcacgtggctgcataggcaccgacgggaagggtgttccgaaagcgccccgagacaggctgcgcagaatgggcactttgaagtcttgaaatggctccacgcccactacctgttgcaaatatggtgaacccccgtccagacaggacttcgtttaggggcaccacgttgcggtcggaggaagcgtaggagaaggatacggacggaggactttgacagggactccgccaggcgatactgagcttgtagacgttgttggcaggacttgtgcaatagagggaaaatatcaaagtgtgtattgtgggggctcgctagctctacctactgccgagggtcgcgagatcttctcgagtggtttcgagatctcggctcgagtggcttcacgatctttgcctttagggtcgtccgttgctttcttctacaaacttaccttcacggaacagtttagttccgtgacacgacctccgttgaagtagactttccccgcccgaaatattgttggactagtcgcactccattcgacccgtgcttggttcttgaacgaagtcgctctgatgatcttgtcggcaaattgttggctcgtcgatggtattcgcgaatgagccctggtactgacagcaaatttgaggtcggctcccaggtaatatcgtcactgcgacccacccacttgcacttgtacgtttccttgccctcttttgtgatgcgatggtccagaatcgtctcgatcagatgaccttctgtgccgtccttgagtcgaaccgtggggatggtgctgtcacgctgagcgccggtagtgtctttccggaattttttcagcaccatggtgtggaaaaccgggtgaatgcccaactcctttggcagatttagctcataggacgcgccgtcgtgcaacactgcgataacttcgtagggcccaacccacttggctgcgaatattctcctgaccgccccgaccgtcactgggttgaagttcttggtggagatcaaaaccatgtcgcccacgtcgaatttctggtctcgtcgccctcgatcatacagaagcttcatttttcagctcccatgcgaaccttggcctgtaactctcggagaatcttgtcctgctgttgtacaaacgccactgccggtgttttttcgaggtccgcaagttgagtatctgctggaacgcgcggattgtacccaatatccgcgtagaatggagacatgccgatcgtcgcctggtactggcgattgtaggcaaattctgccagcgccaagtggacattccagtcgttctgatagccgcttacatagtgccggaggtaggttgacaagatagcatttgtccgttcaacttgcccatccgtgcgctggtggtgagccgttgccagattcagcttggtccccagcaattttgcgcactctccccagaacttagacgtaactttggagtctcgatccgacgtctgctggcagtccatgtagacgcacgtagtgatcgataaaaagttttccgagcgactccgcagatatgtcactcacagttggtacgaaatgggccctttttgtcagtcgatctgcaacgaccatgattgagtcgaactcggtgcttgtctttggtagacccgtcatgaagtcgatgccaatcaaggaccatcgagccgttgggacttctagtgggtgcagtaaccctggaggttttccgggccgcgacttgttccgttgacaggattcacacgtcgccacgtactcttttacgcgtttctgccattttctccagtagaagcgttcggcaacagcttgacttgtcttttcaacgcctgggtggcctgctgtagcaatgtcgtgtagttcccagaggaccgtgttctggatctcgatgtcctcggctgggatgaagatctttagtcgcccctgcgtgcgatacagcgcaatttggttcttttcatcgaacacaaatgcgcctggcgcctcgacctccttctgaacgccccaatctctggtgatccctgcacgccgctgagctctccgtattagttcctttagagtagctggtttcagacgacggactgcacatatttgcttgttcttgcaatccaagaaatcaatttcaaagtcctgtcgccggctcaatgcatcagcaacaacgtcggttactccaggaatgtgtcgaaaacgcaggtgaaactctgcaagctggtcgtaccacctacaaatgcgccggttaatagttttctgcgtcaggacgcgctcgagggagtgatgatccgtttccaccgcaccctccatcgagaagataaacgtgccaaatgttcaaacagtgaacgattgccagcatctcctgctcgtgtgtaggatagttcagctccgctgaattcatctttcggccacagaacgctactggtttctccacttctcctgttccgtcgctcgcctgtacatgctgcagcagaaccccaccgaccgcaaatcgagaagcaccagtgcggagcaggaaaggttttgaaaagtcaggtaatgccaacactggtgtcttgctgagtgcgtctttcaacgcctcaaaggcttcaacacgatctggtgtccactccaactccttcttgtccttctttttgaccatttcgaaaagaggagcgctgatttccgagtagcgatggcagaatctctgcacgtagacggtagttcccaggaatgactgcaagttccgaatggttttagggagaggccactcacgaacgacacgaactttatctgggtcgattcgaactctgtcgcggccaacaaaatcaccgaggcaaggaatttcctgagcgcaaatcattgactttgacagcttcaggtacagttttttcttgcgacaccgctcgaacacgcgccgcacagcggcaagatgagagtcaatgtccttgctcttggtgaagacgtaaatgtcgtcgaagtacgtcgccacgcactcacgcatgtcctcgaatatcctttgcacgatacggttgaatgttgctggggcattactcaggcccatcgggactgcgatgtactcaaataggccatcgggagtctggaacgcagtgtagggtatatcttttgctctcatacgcatctgatagtagcctgaaagcaagtcgaagcatctgtaccagaacgcgccgctcatccggtcgaaaatggcgtcctttctcggcattggtgttgattgccggactgtccttgcgttcatcgctcggtaatcgtgtaccactcgccaccctaccggcttcttgatacaaaaagttggtgcaccgtgcggagatatgctcgggcggattaatcctgctcgaagcatttccttcacccactcacgaagtgcgcgttcctgatctgggctaagtcgccactgcggctggtacacagcccccgttccaggcagaacctccatctcgtgctcaccgtgcacgggtaggcctggtgggagctcgttcttgaaaatgtcatcaaattcacacacgagcgggtaaccaggtgtacctcgaaagctttctttgtctgtcttgacttggcgcacctgtttttcgagctgcttacttgcttgtgcgaagcgcaacgcccccgactcctttccgtcctctttcaacacctcgatatagagcgcgtttatggtctcctcaggaagtattgccacgaactccacgtcgcgttttcggatgatcttgtccgcctgctttagagtgatgtgcttcgtgaacccgaaacgcttgatgtagtaaaagcgtctttcaggcagcaacgggggcagatttggcagcggtttggcctgttgctcagctttatgagcgtcctccttgacctcttgcacgaaagcttccttggagaggatccgatcagtttcccagtcgattattggccgcgccagtcgtttccacggcacacctaacatgagctcacacttgttcgggatatgacataggtagaactcgtacttaatagctggaagctcttcgacgaagacggtcagttggatggttctctgacgcacagactcggtcttcccgttggcatacgtcacctccattgctccatgatccaccacatcgctcatccagccttggctctccacaaaacgctccgaaattccgcaaaaatctgctccttcatcaaaaaatgttctcgcaggtgccgatcgtgcatttttctcgcagcgcactgttttgatcaagtagcgctcaggtgtcaggcttctttcgccttcacctgtctggaaatacatgctgttcgctctcgtccccggatcaaacacacgatactggtcaccactgttggctttgttcggtcttaagccgccaccctcaagaccccttagtttaaatccgacttgatcttggccagatcagtctggatcgcgttcagcaccgcccacatgttgctgttgtcgttctgaggggctgaatttcgggacgatgccgtggcggcggcagctcctgctcgtcgcccaccactttctttgaaccaagccggacggagttcgggatgcagcacccaacacttgtcttttgtatgccccttctcgaggcaacgtgtcgagctgcatttcccggtttcaatgggcatgggttttgccgatgcaggtttcttcttgttactgcttggcccgttgtctctccctgccttctgtgactcggtcgtcgactcccgaggattaaaggaccgagccgcgtccacgagctcttctagtgactcgtacgtctgcgtctttagcagttcttttagttggctcgaccgcagccctttcttgaacttgatcatcttgtacttttccgatacatcatcagtgcggccaagtcgctgaaattcgtcgatgtatgcctctaacgagcggtttccttggctacagtcgaagaaactcgcaaccagatcttcttcacggatcgagtcacgaaacgttgcttcatcttcttcacgatatggctccagcgtcgttgacctttgtagtcctggagtagccacttctttgccttgccttttgtatggttcagcatcagctcgccaacgcgccagtctacttgtgcctgagcgaggtagaggccgtaggcggcataccacgagatcatgtttagcacgtaaacgtcgatatcgtcgtcgttggtccctccgtacataggagtttccttttgcttcatgcacgctgaaattcgactttccagctccgcgttggtgaaatttggggtgtggggtgaacgttggcccacaacatcccaatcagcatacagttcgtcatccggcacggccatgcctggattattagtcgactggctagcaccgtggagcccttggattcgaacggtttgttgtagcgactccatttcaccccgcagtgaagtaaggtcagctcgctgactcgccgtttcttagtcactccgaactgcaaaggtctgaatctggttgatcacctcgtgaagcagggcttggtttgccttgatctgctccatgttctggttctgccgtcgttccatgcgtgttgcgaacgcagccacggcctccgtgagactggtctggtcccgaatcagcgtgtgcagtgtttgctccagcgcttccaggttgtccagtacaagtcgtagcctgccaatctcgcccgcgtcgagtggtcggttgtcctctgctccgccgttctcgcccacgttggccggttggttggcttctgccgcgtcgatctcgttgccgacatcgctcatgctagcgccttccacttcaaggtctactatgttgcaaatatggtgaacccccgtccagacaggacttcgtttaggggcaccacgttgcggtcggaggaagcgtaggagaagggtacggtcggaagactttgacagggactccgccaggcgatactgagcttgtagacgttgttggcaggacttgtgcaatagagggaaaatatgaaagtgtgtattgtgggggctcgctagctctacctactaccgagggtcgcgagatcttctcgagtggtttcgagatctcggctcgagtggcttcacgatctttgcctttagggtcgtccgttgctttcttctacaaacttaccttcacggaacagtttagttccgtgacactacccgactcagtttcaaccagttgcagtaaatgcagcagttgaacgcggcgatctcgaggctgtccagtggctgctcgataactgtcccgaggaatatgagcgtgatgcaatgcactacgccgcaactagtggccgcttggacatcttcctgtatctgcttgagcaccgaactcaagcgttcctggattttacggtgtatgattaggtgtatgacgcgcaagataaccaagtattgtgccgctttgactttgaaccccgtgcatatcgacgcgtcaatcgaccaagcagggatcaacggaggatggtgcagagtgttttcgagcagcgtccagcatatctttgcggtgtctagcggcggttgcgtgttggaaaggcaacatcgcaattctggactgggtgaaccagtttggaatagagctgcgttcgacggcacctatctgagccgctgttagccgtggtgacgttaaattgttgcagtggttttgggagaacgggtttgagattacaaatccgaagctgctcgaggttgcagttcgtagccgtcatctagaagtagttcggtggttgtcggagcacgggtacagtggattccctcaagttggccaagattgcagcaaaatacaaaaatgcggtggctggttgaacatggctcaccccttgacgtgccaaccgcaagaacggcagtcttagactacgaccgcatcgagctcgcttggtgggtagctgaggacgtccggagccaccttgtgtatgatacactggacagggattggaaaaaatatattggtccaataccaataccgccatatgccaatacaatacgatactgtattgcagattgtattgcaatacgatattgcggagtccctatgtattgcaataatatattgtcatataacgagcaatactatattgtaggtgtatctcaaagccaattcactgtggtgcagctgcttgaggcagcgttcgcggccctggcatttacgtatcgctacggcaaccgttttgctcgcccaaagagcaggatcgacgctaaggacgcgcgttatctaggtgaagactactggacacgatgctgcttgtactggaggggggggtacgaatgtagtgagttggtctctgcctcgttcctcctattccaacaccttcgggcaaaaataacattagccaaccttgaaccgcgcttccccgtacacttatcacaaggtacgatggacttagaaccttcacaggcatatagttgaccacttctaacagatgcgtagtattgcaatacagctttgcaatactgtattgcaggcgaacggtagattgcaatacgggattgcggtgaagacatgcaataccaatgctgtattgtactgcatggtggattgcaatccatactgcaatgcttactaacgctgaaaaatgctggccaacatattttttccaatccctgacactgggcaacaatgatcactccactctatggtggatgctcacgcggacgcagtttcgagacgaaagcgtacaacggagcatccgtggagccatccagtgctgtccagaggatacttaccggtggcttcgagataatttgagggatgtggaggcttgccgctggtgtttctcgacatcaaacaagaggcggaaccacaaaactgaagaaagaggtccatcatctacgagaggcagacgttgtgatgaacagggacgttcaggacatcggttagctttttatcctggctgaagcatagtgttgtcattgtttggaagcaaaaacagaaacacaaccggaaacttaacaaatttgcacgtctttagtatccatgtatttctgataggcgtatcagcttgtctgtgtcctggctccaggtctgacgggcgagatactgtacaatgtcggtgaaggttcagcactatatttgcaaaaaatacatttttttcaaacttttgtagctcgctcattcgatagcaggtctggaaaggtgaacaacgtgcagttaaatatacaggtctcaactttgaataaatagtccttcgagcgtgtcaactgaacaaaacgaacaagggtccgtgtgtcgctctctgacagctcacaagtaaattgctccgcagccgccttgattccactccgagggggccagccatcctgaaagtccagttgtataccaccatgagggtcgaaagagaggataatttcatctccgtctgcgctgatcctcgtaaggatctccaccttgaatggagaagcattgaacacggtaccggcaagagatgcgaagagccacagctccaacctatatccgatgtgaaaggggtttttctcgatttgagcgtgtgatggagtggagtttggtacggcctacaaacaaagcgaaccctctcaccacaaatgaactcagcagacgccgtgctggtgcatacatcccgcatccaaaaggttccggggtgataccatgcgagcagctgattcgtcgctgtacaagacacgtcgacggtcaatccacttctgaagctgtcgacatccttcacattgtgaaacacgggctctcagactggacttcgctggttccacgtcggcgtcttactacaagcagatggaccacgcgatctccaagcgacacgtctcgcctaaagtggtccaggttggttgacttcgctgccatccactgtcaccgaaaacgccatgccaacgatggcacaggaaatctccaccatctttccttgaggcggcagattctgaaagtgagaatcgcccagttgatattgtagagggatccgattgacttaactacagtagaggcgattcgtgattttttcctcgtttttttattcttgcagtacaaccgacattgtgcagtatttctactgttactgagtgacagacacagacaggcagcttttgcgcttactaatgagccttatagtacattagctgatggagagggcaagacgaatgaaaaaaatgaaggctgtgacatcccatcagacgagtacaatgcacttgaccgccacaaccaaattcgagttaccatgcagcagacctcatgcattcgcagagccacgtcagtcgtgtgcaagacgttccaccatgcgacgggaagttggctttcgcatgtgatagaatccattgacgactatttgactgggagcttggcccacaacattctcagcgctgcgtgcgaggcaggcgcctcaaacaccactttggactacctcttagagaagaccgcacctgtctggagcgaagccgtaaaagctgccatacgaggagggcatgtgcatgcgcttcggtggatgacggagtgtgaagactgccgtggatcctggaaacgtgatttcttcaaaactctggagcttgcagcaagacacgctcaccttgatgtcgtgaaatggctgcttgagagaggaattgaccggcgtgtattactaggtgcctgggaagactcgacaagatggatcgaaaagtcttggctgtatgaatattgcgcggcagatgcattgagcctggcagcggagcacgggcatctggaggtggcgcaatggatctatggcgcacgggcggacacaagctgctgctgggtctgtattccaatgagcaaggctgtcgcaaacgggcatcttgacagcgtgcagtggctgcatacggtcaaaggaggacaatgctttgctcgagctgtcgacaaagcggctgagaatgggcacctcgaagtgatggagaggctgcatttgaaccatcccttctgttgtacgacggctgcgatgaatggagcggtggagaatggacacttggaggtagtcaagtggttgcaccgagttcgtcacgaatgctgttcgtcgcaaactctgtggcgagcagtcaaccgtggcagtctagagctgatcgagtggctttatgaaaacgtgtacggtaagtgttatcttgacgctgggccggtgagtgcaaccactgctgctgaacaagggcgcttgaacttggtaaaatggctgcatacacattttcgtgagggtttctcggcatctgcgatggaggctgccgcaggaaatgggcacatgggttttatcaagtggctgcatgaacatcgcagcgaggggtgtaccgatgcggctccatttagggctgctcaaggtggacatttggagattttaaaatggcttcacatgcactattccaatacgtttttacctacaacaatggatgcagcagctgaaaacgggcagtttaaagccgttcaatggttgcatggaaatcgctctactgaggcactgtttgctgccgccattaacggccacctcgacactttcctgtacctacttgagcaccgaccggaaggtttttaccatgccgtaagctgtaactttgatgctgatgtgcttgactgccatcgacgctcccacccggcaacgggagaccaattaaagatgcttcagaaagttttcaagcaaaatcaagcttttgttcgaaattgtttacggatgctagcggagacagcgtgcaacgcggggaatgtcgggatactggactgggttaaccagtttggcatcgagctgcgatccacagagcatatcgaaaacgctgtcatgcacggtgacgtcaaaatgttgcagtggtttttcgagcgtgggtttgaagtaagggatccagagctgcttgaattggcggttgaaagcggtcagttagaagttgctcgttggttggtggagcaccgtcttgctgtgatttcacttgagctggtcacgattgctggagatattgaaaacgaggcgatgatgaggtggctggttgagcacgggccaccgcttgatgtggcaacagcaatgcggttggtgtttgactatcattacgtcgagattgctttgtggttatcggaggacgtccggcaacatctcgttcttgaggcgttacgtaaagctaaccacaaggttatgtggtggatactctccaaaacgcagtttcaagatggagctaaaagctgcatttgtgatgccatccagtgctgtccgaagaaggcgcaattatagattgaagagaatctgggtgtcgtggagacttgtcgctggtgtttcaagaggcaactggatgcaaccgaggcgaccgctgtatttgaaacgaagcaatgaagtttcgccaagcacgctggtatcgagaagcctccttccaaaagagcgcgaactgagactcttgacgccgaggcggaaatcatcgcagaagctcaaacttacacaacagataaccgcggcagagctctcacgctcctggaacgtattgacgtcctcatcgtcacagccaacttgaagtctggcgctgtcaacttacgtcagataaagccactcgcagtcaaagttggccgtctgttgtcgcgctcagccaacacagtccgtcagatttggaatgactttgccaagtatcggtctctacccgtggcatcggcgccatctaaccgtgagcagaagccgtcccgtatattggcgactgttgatatggagaggtctgtgcgcgagtttattcgtgagcgcagcgcgattcgtgagagcacggttgccaaggacgtcatgcaccacctcatacagcaagagttgttagtcaccgacagtgccgctacggccccagcactccgcaccgtccaacgcttcgtaaaacgatgtggtttcaagcggggaaagcggaaagggtcgacatatcggttgtcagctgaaaacgaagctaagcgcgatagctacgtgcagatgatggcatgtgaaagtgccgatcgcgttcgaacggtttatctcgacgaaagttatatacatcacaactactccagtcataatgactccctttatgacccgacggaccccaacgtgataaaggagaaacaaaagggtcgccgattttgcttcatcgctgccattatcgacaaagaccgtaacctcccggatgccgatcatactgaggctgacaaagcacagtttttgccggagatgcttgacatttttgagggatgcaagcaaactaaggattatcacgggatgttcaatcatgactacttcaaaaattggattgaaacgctgctcgtttgtctggaagaccgccaactgcaccactgccgcatcgtgatggataacgcaaaatatcacaagaagttgccgcccaacaccccccgaaaagggagtcggagatccgacatgcaggctgcttgtaagttgtatggcttgccttacgctgaatctgatacaagggcgatcatgtgggaaaagttgtcacggcacattgctgagcacgtagagccagagattgtgactatggcgaagaagaagggccacgaagtagtgttcacgcctccacactactctgatttacagccgattgagtatgtgtgggcaaatgtaaagggagaagttgggcgccagtacaccaaggatactacattccaacaggtcagaagtaggcttgatacagctttcaaaactttgtcgtcgaaaactgttcaaggctgcattgacaaagcaagagcccacttggtggatctgaatgctcagatcaaaagttatgatagccgcagtgaaaacgagggttcggacagctccgagagcgacgaaaggtgtgctagtgatgactacactagctaatattttagatagccataagtaagtctagacactgattctaagaaatatgatccgatacatttgtagccctgtacgtcatctttcgatctatcggtggaagaatgaggataacgagcatccgtccagagtatcatttctctacgatcatgactctgcgactaatccgctgccttatcattggccgagaaaaaccacaggggtggtaatgattggcccaaatgcaaggcatatttataatcagcgcacatattaaggggtggttattatataaatcagggaaaattggactgctgtttctgtggaaacgacgccgtgctaaacagtgagacgcacattttcgcaatcagggaagcgaggcggtttttgtgataccaaaacatgtaggggttagaaaaaacctctcgatcgtgtcgtggactgtgaagtcggtcgaaaccctgctaccgacgtgtgcaccgtgatatctcgtgaaatcagtgaccgcttggaacttgagatcccctggtagcctaattgctggaggcggccctgcagaatgtagcgcgataacaaccgtcttctctgagttcacactaagcccactggcggtgctgaaattttgcgtaatagcgagtaactgggggatttctgccggagatgccagataggccgtagtatcatccgcgtacccaccgactcgtaactcgatttcccgctctgccgctcggagccggatgcctcgaagccctttggcagagtcaattgctctgtagtacgggtccaacgccagaatgaatattaaaggcgctagaggacagccctgacgtattcctgtcgtgactggaacccatctcgatctgcggccattgaccaaaaagcgcactcgcgtgccggcgtgaatgctcgcaatagcgcggacaaattgggcggggtacccgtgcgcttccagtgctcgaattaggtatcgtcgacccaatgaatcgtaagccttgtggaaatcgagtaagattgctagagcttctcgctgctcttcatccatattcgccatgtgctgtgcagcttcgaacaggtcaattgtatcatgtatttgtcagccaggcacaaaacccttttggtgatggtgaacgcgatctggcagcgtcttgctcacccgtgtagccaggatccgagtgaaaattttgtagtccgaattcaataaagccaacggtcggtagtttagtggatttgattgatcccccttcttctttagacaaaaaatgtcggtctccagaaatgatggcgggaagacgccagcccgataccaaaggttaagcaaaatagtcaggatgggggcaaggagcgccttgaagtcgcggtaccaatcattaccgagggtatcaggaccgcacgctttcctagcgtgacaggcatcaatagcagcagaaacctcagactcggtaatgtctgcagccaccgcatttagcaagtcatcaggcacgcgatgatcttctgtccatgtgagggcagttcctgtacctacttgagcaccgaccagaaggatttaacatatgattcgttggtacaattttgtagaccgcgattttgattctgatgcgcttagccatcagcgactcaagcagaatcgagcggttgcacatagcccaccccttgatgtagcaactacaatggcgttggtggttggcttgcgttgagattgcttggtgggcatcggaggacgtccggcaacatatcgtccttaaagcgtagcacaaaggtgatcgaaaagttctatggtggattcttacccagacaaagtttcacgacgaaagcatactaggcagcatcagcgataccatccagcgttgttcgaagaaaactcgattgtggcttgaagggagtttgaatacagtggagacttaccattagtgcttatcggctgtcgagattatcctgatcgaagggaaggtgaagttttgtcaagcccgcatttgctctccggcagtgcgaagcagcttcgatcgtagaaatacaccttactaagaatggcgaaggcttccgtttgctagtatctttccaatgttagataaaagcacgatatattcaggaaggactccgaatccatttattgtttgtaacagaaattggaaattgatgaggaaaaaacgttgatttaaaattgcaggtcgaagtccgtcatcgctgtctggtcaagttaaataaatcaggtgacaggtgattaagctaatctgatcaaccaacaattacagttatcaacacgcaactttctcacaatcgtattcgagtagctatgaagccgatctctcgcattcgcagagccacgtcggtcgtgtgtaagaactggctgccgcatgtgattcaaaccattggcgactacttaagtggaagcttgagccacaacgttctcagtgctgcttgcaaggctggggcctcgatacccactttggactacattttagagtggaccatacctgtttggaacaaggcagtgaaagttgccgtacgaggcgggtatttgcaagtgcttcgatggatggcgtgatgacggccgtggaccctggcaagaagactttgaaggcctgctgtaacttgcagccaccctcggccatcttgatggcgtcaagtggttatttcaatatgggatgatcaggggcatgttttggtatcgtgggaaagctatgaacggatacattggtaaaacgtggctgtatccgtacagcgcgccgaaagcattgagactggcagctgaatactgacacttcgagatggtgatgtggctttctggcccaaaacgaaacgtgcagcggaagctatggtgctatatgcaaagctgttgcccaggggcaactcgccatcgcgcagtggctgcacagcgttaatccaggagaacgctgttctgcggaggacgtcgacgaagcagcaaagaacgggcacctggaagtgctgcaatgattggacgcgaacaacctcttcacgtgtacggcgtcggctatggacggagctgccgaaaacggacgctttgaagttgggaaatggcttcaccgagttcatcacaatgaatgctgttcctctgaagctctcggacgagcgattaacagtgacaatctagagctggtcgcctggctttatgaagaaaacgtatacggtaactgccaccgtggtgctggacgattgagtgtatcaacggttgctgaaggtgagcatatcgacgtgttaaaatggatgcatgagcatttcgctggggctttctcaagcgctgcgatggatgctgcagccagaaatgggcacttgcacgttctctcttggctacatgagtaccgacgggaagggtgctcccacttcgcctcatgatgggcggcgcagaatggccacttggaagtcttgaaatggcttcacaaacattatccgactaaatttcgttcagccacgatggacgtagcagttcaaaatgatcatctcgaggtggcccgatggttgagcgaaaatcggaccgaagggtgcacaacagaggcgatgtatcccgccgctactgcaggccaccgcgacacgttcctgtatctactggaacaccgaaaggaacgattttatctgcgcgagacgcacctgcgtattcacgtaagctccaatttttaatgttgatattcgtggcaatcgttgggctaatcgagcgcctagtgatacactggtgatgcgaagaccgttttgaagcagggaccaaatttggttcgagagtgtttacggatgctagcggagtttgcagtgatcgagggtcacccagcaattctggactgggcgagccagtttggcattgagtttcattcgacggcgcctatctgtattgctatcaggcgcggcgtgaagatgttgcggtggttttgggagaacgggtttcgaagtacagatccagatttattgaatttggcagtccgatgtcaccagttgaaggcgttcggtggttgtcagagcacgggtatgttgtcgactcactcgaattggtcaagactgcttagtatacatcagtgtgtcggtattgcggtgggtggttgagaatgggccgccactggatttagtgacagctatgagtctggttttcgacttcggtcacatcgagatggcttggtgggtagctgaagacgtccggcagcacctcgtgtttaagacgctgcagattgataaacgcgaaattgtggtgcatacaaagtttcaggacgaaagcgtgcgacgaagtatttgggacgccatccagcggtgtccgaacgatattcaacagttggcatccggcagcgaagcctcgagcgtgtcaatgggcacgttcacgagcgagaacttggtgcgcgtgcggccggcgatggtatcggcgtcgctctcagcccccgcgggctcttctacatactgtactgattaagtacttacaaaactccaaacctgggaagtcttctccatctgtgtgccttcactacttctagcgagttgtgatatgcgtgcacgaaatgtaatttcagctcgtagttccgtttaacgatgcccccggggaggggggggggggggtcggacacttgttttcggaagttacttgaattttcgaccagatttttgtggcttgttaagtcaccagaaggaggaggctagcgcgagcggccccttcctcatgtaacaataagtaagtggtgcagtctcgctgtatcaaattggaaaatacttgcatttcaaagtcatcatccttacattcttagacagcttcgtcgctttagactgcaagtgctaaacacttacgaacggtggtgatcaacatacgtactcaaagtcgaaagcaaagcttgctttggagcggtaaagtggctcagttgtcatcgaactacacaacccatatttaggttacggtaaccccgatttatctgacaaactgatactgtaggcaatatctaatttgacggggtacaagtttatccagtcaaaatagccggatatcattggaaaatatacaggtgtgggtaggtgacgataaatgtgcccttgctgctctgtcgcaagaagcggtctatccatagctcttccggcatattatacacagcacaatccaaagcagctctgaaaatttgggtcaaattgcatgtaatccggaaaagttatagcaaaaacacctctcgatgctgtcgcggtctgtcaattggcacacaacggtgactaactgaagacgcgactgaggcttgcttctagcaagttactgaccgaggatcaacgtgctattgtcgctgccgctgtcgttatcccgaaaatcaccttcattgcacgacacgcttggccgaccacgagacaagtgcaggaattacagcgacgcattcataaatttgtgtggttcggtttatttgaagaaaaggggtcttttgggcgagcatggattgctgcggacattgctagcctccctcgttgccacggtggactcgctatcccacaagtcaagctcgaactgcttgctctggcggcgaccaaagtggctcgctgggcgctctccagtgacgagtcgatgtttgttgttggagcgatcctccggcaactgggtcgcatggacgccggcgctacttacatttcagtcagcaatttggcccggaccctccttccccacttcattctgggatgccggcaaggcaatctggactcgagcagcaccccccaccaccttcagcgttggtcgccccgttggccagcttgatcagggcactcctcccttcctctgacgaatggcgtgacggatcgtgcctaattgacgttcgagaattgaaagggtcagcgactgggccgctccgtcaatggattcgaaaccagaacggcattttttgcgctgaatggctaccgttgatggatattcggagccttgcgttatttgacggttctggagcgctgacagaaccttcgatttgtcactccagcctagcggatcgtggaactcttgttggagatattgttcggtggtatcacgtcgaggaaacgcacatgacatttcaaatagcaaagactgggtttggtgtctcaagtccttcgcaagcttacagaaggcatgttgcgcagttaattggactccttctcaacatgcctgagctgacttatggatcgatgaatcgtaacgaggtgcgactactgacgaaacataccgatcacccttatccttatgcacttgaagtgctgcttccggattcaactatggccaaactgaccattatcggtagccctgagacacgctacttcccagtctatgggggtcacaaagctcagcagctcctgggtgcacttcaagaatcgctaggatccacaacagaggtcactgggtttcatctccaccctcaattagaccgcctcgcctgtttgtgggcgggaagcggcgatggagctgcacacggaaatcaatcaagctacgagcgatggatcgcagcaccaaagacgtcacggctgctttggaacagcggatgagcgcccggaaagatgaggacccggtgatccatgcagcactaaagtcgatttcttggaagcaacttcgacgttggccaggtttggatgtatgggaagactcgtgtatcgtctcaaaattcgcagcgttaaatgttacgatcgactacagcggaaacttgggtgcccgcatgactcgtgcgttgggcatccgtataccaccctcacacacatttttggcagtgcacttctgcggcgacgttatgggcggttttcatagcgagatggactctgctcggattagaggcaaccttaagcaaccaagcaagctgtttcacgttcctccttgctactatccctgaagggtttattgatcgttcgaaggaggaattcttttggttatcttccgagtccaaggaggctactaatctgcaactacatggagcggcagcggactgctggaggcttggagttgttacagtcctcaaagtaatttggaaatggaggaatgattactatgctgctgttacctcgctggcgacctcgaaatacaaggccattctcagggctcggctccaggactcgtattgcactgttgaaaacgcatatcgcgcagctggccggtcgcgggctcacatacgggcgatacatgctgtcgttggagcactcaatggacattggacacctactttgttccacatagagggtgggtcggcacagtttgggttattttttgacggtggatctcgtgggaatcccggaccagggggcagtggagcagtcatcctgaaggtcgacagcgattctaacacgggcaaagctgtctgggcggctagcatgtcgtacgcggcaccaactactacaaataaccaagcggagtacagggggctactacaaggactccttcatgctcagcgaacagaccactacacgtcgtgggagacagtcagcttattttacgacagcagctacaccggacggcaccaaaagatgcccatttgcgcactttgtatcaaagatgcagagtgattgccgacaactgtggtgttcgatcatggtcgcatcacctacgagccttcaacaaaacggctgatgccttagccaatctggcaatggacacaacctgcagcaggcagctgctttggacttctttccaggagacctacaacattggacggcaggagctgcaaatgctgacttcacacaaacttcagcggcatcgtccaccctataacggactgtaccctagaagggtgctcgcatgcagacgacgtaaatgagcggaggcaggaactttgtattagaaggcgttaggttctaagttactacaattcaaaaaaagtaggtacaggaaagtgttaaggtgaccgctagtggcggcgagtactacacccttcggggcaagattcatgtaaccattgagcaatttcaaggtacccattctcagccgttttatcgacagtttgaacagaacttttttctcctttgaccatatgcagccaccgcacaatgtcaaggtgtccgtttgcgacagcgttgctcattgggctgcttcgtgcgttatagatccactgcaccacttccaaatgtccatgcccgtgtctcgtttgtggatttgggtggcaaatttggtggtctgcaccacgccctggagcgattcccgcagccgtgatctaaatcctaaaattctggcggcccccctgtcagaatttgattgtcccagtgtaatgaaatgcacttttctgattcattcttttcgattttcggatttgtaccggtttgtgacgcttaaaatgccgctggaatcgctccactgcgatccccttaccatcggcgaaaagccctcatactttgttcggaacaaagtatgacatccttctgtataaagtataaaggtacaaactgtcctgctaaccaattatgaggtttccagttatgagcggccgttgggaatgtggggcttgtcatacttgaatctgataacgtatgagagagccatttggtcgaatcggcgccattgctgccacaaaggtttgtggctcaattgtggctcaaacatcgtgaaacaaaaaaagcactatctgcgagactttatagcatatggcattcgagttcccatatgcctaccaagttaccataacacggtagcttaccgagttaccaagttgccgtactagggcatcctaccaagctaatcatgtgtgcagtcgacggtgcgcctcaccgtgtagatgcagtgtcctgggcctattgcgaggtcagcttcttgaccgttaaatcgacgtaggtatcatagcggttgcagcatcgtgtccgtaaacactcggccatgatacgagctctatatgatcatcaacctcatctccgacttggcgttcagctgcgctgccgatgtggagctgacgcgttctacttctgcgtgcaccttgttgtagctgcagtcacccggattgcaacgtcggtgcgacggagccgacgctttcttgggctccagcggcgtaaggtctacgacacagatcgcatggtggcatggaggctactctggtctacaccgtacgcgcaagcgtcgtcggggtgatggatggtatgctagccgtctcggcaatgagcaaaatatatcaatgatagctcatggctcacgggcatggtaactataatgacacgagctcattgagctggtactgcggttcccggacttgcagcgctggccacagcgatccgacttgcaccaattaggtattatattcgttgtatttcagtatgatctcgaagctagtggtagcttgtggtctactgtggctggttgtggctccatacattcaaacctgtcaggctttatcaacacagaatggtccacgaggacaataatcagctgagccacaattgagccacaattatgtacattaattatgtacattttatgcagttcactgataggatctcaagtgtagtgtatatccagacggcgaattcattcctactgcttgacctttatcacacagcgcgcgcacctttggcacccgtggcgaccagccttcgggcctatgcatggctactcctgccgacgatactccaccgagtagtggaccccctccactcattcatttgacctgcatctagtcactgttgctgctgctgtcatatgttcggccatgagtgctacccgctccaagacgacgtctgctgaccgcgatgacggccacggaggtgagcgcggcggtcgacaaggacatgaacgatgtcgttcatccgtctgcggctacgctgtgacgtaccgctgaacaagtggtacgatgcgacccaacaggctgcggatactaccgagagacggagtcaatttgatgtagaacggaaatgtggtcgatgcttacccaaaatgcttgggtggcctcgacccgcataatcctgtgccactgtagcttaaaattgcgctggctttggtgtacaaatgaacatgacatgcaggatggcgtggacctctgttcaggaagtagttgtttaaccacaatagagcctggaggccgccaaagcatgccattgcgttgaactctatacgcatatcatgacctgtaatagatcgccccaccacaaatatcaccttaggcggggtatgagtcttctttcagggtactgtactccagtttggtttgccttttgcatgaaagctctcgtttgtaagagccaccactgcaggacatggttcttggttcccacagactccagagaggtttccgtgcagccatttggtaacttcgaggtggctgcgtgttattgttgtttcatacagcacttccgatgagcactcccccaaactgaggtagggaaactccgctctctcgcaggcgatgccggcacctgacagtttgcgttagtgattgtattgatttttgttttttgtgtaatatgtaccttagccacaacaaaggcctagtattcgagttacaatattcagattgtcgactattccgaatagttcatagtctattcgaccctttatcaaacgcatgcatatattcaaatgggtacacatcctgaaaaaatataaaagcgactactacttcagcgccgatccttgaaagtaccaacgatggacttcgggaccatgaatcgtcgtcatcaaccacttgcgaatgctttcattcgtattttggttagccttgtggatttttatcttgcaccaccaaccaccaaagtaataacgcatgattctcgttgttgactgactccagtaccaactgcacgcggtcatgttcgttcagcctccaagttccctccacgtggttgttattcacagccaacgttctagctacggctagatccagggtagccccccacgctcgattaccttccgcgctaaaggcacattccctctttccacatgcggaacggcgagattgcgtcggagcagcttcaccaaccgagtgactccagtaccaactgcacacggtccggttcactcagccacaaggttgcctcaccgttgccatatttcacagccaaaattctagctgttgaaagatccagagtaacccacgctcgactaccctccgtgctcaaggcacatcccctctttccacagcaattatattcaattccgacaaatcgatctcgtagccttgttcccaaagctagaaagccaaatgtaggctcccatgttgcgcagccaactccggttcacggatttcgaatccattttgatgaaactacttcaccaaaagtgagcatcctgtaatgacagcagtgcgaacgggggcttctgagcgcattttgatcccgaatttcttcagccacacgaacatgtggtcacagttgtttcgaattgccattttggccatgcactggaagcatctctggacgaattcaagacgccgtatgtgcacttcctgcagaagtttcaattgatcccgctcttcatcatcggctgtcgaacagagtacatcttcaaacgaacacaaaatctcaacatgggtttcagcttccacgacgtcgcgagaaaatccctcagttgtgtgtatgagcaaccacaccatcacatcgagatggccattaagagctgcccagtccatggcttcagtcgtgcacccttccgttcgcttttcatgcaaccatcgaataacctcgagatggccatttgttgcagctccgtccatcagacaagccgagaagctgtcagaatagtggtcgtgtagccattgcactacctctagattgccggtgcttgcagcctggtacggtgcatcaagcgtgcagccctcacttctgtgtcgatgtagccattttatcgcatccagttgaccaaaatatgctgcttcgtccatgtcatgctcggtgaaggcgccaggaacatcctcgtgtagccactctagaatatctaggcgaccacatgctgccgcattaccagcagaaggcacacgcgactagctcaaaacccaagaaacgtcagtcgacacacatgttgtcattcacccattcggcaacttcgaggtggccatgcgcggttgccagaaacaaggtatccgacgtgcatacccccaacttgtttgcgtgcaaccactaaacaacgtcaagatgtccattctgggcggcgccgtccacagcccgagacgtgacgcgtaggagtcgaattgaatgtaaccattgcagcatttccaggtgtccacttttggctgcttcatccatagtcgactttgacaatgttggcatactttctctgaattcatacagccactttgctacagttagatggccaccggcaacagcttcctccattactcggatccagtttttgtccttttgagcaccgtacaaccactgcactatgtctagatgtccatttctagcagcaacctctaatgcccgtggcaagcaatgcagattcttgtacggatcttcaactccattccaataatcaattccacggtcgtaaagccaccggacgagttcaaagtgcccacttcctgctgcagtctccaatgcacgcttaaaatcccctctccacggccgcgtccgtcctctcgctctgtcatccaccgaaacacgtgaagatgaccaccttgtgctgcgtcatagattgcacttgcccagtttggagcagttcgggacaaaatcatcgcgagtgtacgcttcgacgcgcctgccttgcacgctgcatgcaatgcttttggattcagtggcgaagacatgaaggcgttcattagttgttcgacgtggggtaggcagcccccatgcactggcaggcaacatcggcacactgcccgagtggccgagatgatacgttcgttggtacaaaccatggcggaatccgttatgtgctcggtcctcgcagcgcatagtccccctccatctctagcgttaccttcacaactatcgttttcgccaatcataccaccagtcacagtggctacgaggatcatgaatgtgtaggttaaataaaactggatgacttgttactttctaacaatcgacgaattgatgaaaaattaattaaactacctgtatgtaatttttaccgtcgacgaagcacactattgccatgattgaccactcgaagcgtttactcaccgagtactacaccgaaatcgggtatgcacgggctcgtttcgatggacccccacaagcgccggaggcgcagcaattctctcgaggctacggggtcgacttacctaaattgcatgtaattctgatggcgttgaacgttttcttctagttgcaatggagaatcctacgtgcatccgcacagccacgcgagtcgtgtgcgagaattgtcttcccgcttcaggaggctggcttccgcatgtgacacaatgcattgacagatacttgaccgggagcttgcgtcacgacgttctcagcgctgcttgcgaggccggggcctcgatacacaccttggactgcattttagagaagaccgcacctgtctggagggaagcagtgcaagctgccgtacgaggcggacatttgcaggtgcttcgttggatgacggagcgtgacgacggtcgtggaccctgaagaggtgatttttacaaaactctggagcttgcagcacgacacggccaccttaatctcgccaagtggttgttcaagcgggggatagatgaacatacacaagactcgaatggaaaattcgaaaagacttggcggtatgaacagtgcacggcagacgcgttgagtctggcagcggaacacggacacttgaaggtggttcaatggatctacaacacacgaacagcgaagtgcagccgtgtcagcagcccagtgaacaaagctgtcgcaaacggacacctcagcatcgcgaagtggctacatcaggtcaaagaagaaggacaagaacagcaagaaaaagaagcagagtgctccgttgaagacgtcgacgaggcaggccagaatggccacctccacatgctgaaatggttacactcgaacaacctcttcacgtgttcgtcgaaagcaatggagagagctgcccgaaacggacagtttgacgtagtaaagtggttgcaccgagttcatcacgaatgctgctctccgctcgtcctgaacgaagcggttggccatggcaatctagagctggtcaagtggctctatgaaaatgcctccaagtgcttcctaggtgggtctcacgtgagtgttacgactgccgctggatgcggagatttgagcgtgttgaaatgggcgcaccagcacgcccagttgtcgttcagttttcaagccatggacgccgcagcaagcaatgggcacatggatgtcatctcgtggcttcatgaccatcaccttgcagggtgctccgcgtcggcagtgtcttatgcggcatggaatggccacttgaacgttctgaaatggctgcacacgcgttatccgaccgcatttcagccggatctaatggctgatgcagcctacagtggtcatctcgacgttgtccggtggttgcaagagaattatccgagatgtaatgatgcattgagctacgctgctgctggaggccacctcgacatcttcctgtatctacttaaacaccgaacggaaagattttccctctatgcggagccaggcgcaaaatatccgggtattgtgccactttggtcccaacatccgacgaaatcaacgcctcaatcgagcaacacgcgctcagttgaagacgctgcggactgtgttccagcagcgtccagctttccttcgaacttgcttgcggtgtttagcgagtgccgcgtgcgctacaggcaacgtagccattctggactgggtgaaccagtttggactcgagctgccttcgttagcgcccgcccgtaatgctgtcagaatcggcgatttgaagttgttgcagtggctctgggagaatggattcgaggctacggatccgatgctgctgaagctcgcaatggagtactcgcatctggacgtcgttcattggctagtagaacgcgggtatgaggtgaactcgcttgacctgatcaagtttgctgagaatgcatcggtattgcggttcttggtggagcacgggccgccacttgacttggcaaccgcgaaggaccttgttttagagaaccggaacatcgagattgcttggtgggtacctgagaacgtgcggaaactgcttgtgcttgatgcgctgcaggacgaagatggagaagttttgtggtggattttggcgcatacgaagtttcaagacgaaggcgttcaaaacagtatccgtgatgccatccagtgcgcttcgaaggatacaaagcagtggcttcaggcgaatttgaggaatgtggaggcctgctgttggtgttttccgacatcaaacaagaggcggacggctcaataagaacgaagctgaagtgtcaatgaagcaccatcctgggtctagtctgttaactcagaaataaatcatttgccattgacgtttgtgtcgcacatacctacagtcgaaagaagttgcctcgcataactacatttcatttatttgtcagcatgaaattcactacgtgtgataagctgccaaggatacgacgacattcgaactaaaactgggtgcttaatcggggcgctctcgaaaagagactcttggttgaacggcttcattaaaagtccctcgttaattattgcgatccaacgcaggtggaaatatactactacgaagtattggcaatagtctatgactgattgtgtcgtcaagaaagaaaacacatcgtaaatgccaagcctggacggctggggaagcctttacaaacggaagcgactttagtaccaatttggagccctcgtgcaaacgtactctgctgggttgcgatccagtaaataggctgcgctgccagtctcacggcgttccgggtatttggaatggtgcacgcactgttcggcaggaagtggtctgcaactccattaatttgacagattgatttgaaagaggtacccggcgcaaacccaatggctgccatttagcgcactgtggccgataccagcagcagtccagtcgtctcaggggtggctgcggcccgtattcttctggaagtgcatttgttggaacttgacgagagcattccagttgatgtgcgccatcctgcggcaagttgtgcacgcccagggttttggcgacctgtgttggcgatatgccttcggaaagccaggatcgcagccactccatcgcttctacttcggttcgaccaaggccaccgatatgcgcccagtctatctttctctcttcgccgttatcagcgccgtccgcctcttcgtcatacaccgtcctgttgacgcggagaaatcgtctgccaccagtagtcgagcgcacgccttccgccacgatctcggccttgtcgagctccaccatcggcgagagagcttcgctgcttgcggctgcgccagctagtagtacgtagtacgcacgcatgtcggctttgtcgggcaagttggtggatgggcgctcgaaagcaaattgcggaatgagtcttgaagcaggaggctgcgagctcgtgaactgatgtccactcacccgcacagtagcactggcgagtgtcgatctgcaagctgcatgttgtagccgatccacgaaaaattccttgcagacgtacggcgctgcggaggtggcttggggtacacaagcaaaaaaccgatcaagcctacttggaggtgtattataaacttatattaataatacgtgctggagggaggcagcagaatccgtaaaatacgtgagcaagaggtgtctagagtatgatttcaccgtttcgctagtatgctttctctcactttccgatttggttttgaccaacaaaccacgcaactgacctacccaccgacgaagtccttcccagccagtggcacaacactaccactcgaacttactacccgtttttcaaacgcttcaaagcggttggcaacgtcggcgaattggagcagtagctagccgttggtgactctgacctgaagctgtctgtgaccgattcgctacggcgttcaacgacatcgtgaggcactatgagcgtcacgacaagtccatcaaaggcatactcgggggctccttccttttacgtgctctagcgacgctcttgaccaccgcgtgcagcatgttcacgcccattctgtttgaaccatggcgtaactacattcgcggcacctacgatcgacatgtacgacttgggactgtggcttggcactgtattcacctcacacctcgcgaacggcatcatgctacgccgagttgatcgatctctgactgacagtgtcgctcaagggactgaaggccatgtgtcgcaacacccagcaaaggcgactccaaggccgtggggctcacggtcggtgggcatctccaacctcttttcgtcgcaggtcggcaacgtgttctgggcattgttcgagttcaacgtcgtgtggatcacccccatcgagatcgtggttgtggtcaccagcctgtacgacggcatcggcgttgctggagtcattgtagcatcggtcgtagcgagctttaatatcgccaaagcttccggagataggttcgaagagttgatgcagcacaagaacagccgcatgaagaccaccaaggaggtcttaaacgccattcagatcgccaagctgaacgcgtgcgggggggggggtcgtgggtaaaatccacaggtcgtgtgcgacggctatcaggaagctcgtgtttcttggtgcgctcaacatttccgtgctgtggaactctccgttggtggtatcggctgcattgtatgcagttgtgttggagatctgcggcaaaagtgcttccggtgatcgcgccacccggaactgctaagagactttcacaagtcgcacaactcttttacatcacttttagttttgactttaaaaaatcttatactgagatcgattatttagaaaaccacaaatttcagagcttcttcgggccgcgggcacgagaaatgcttgtcaggttatgtgcaaaatatttgcccggtgcgtcttatgcgagcggaccttccaaagcaccaaccttggatagtttattacgtcagagtagtacgaatacatagtagaaactagcaactagcaaaggagcgcgggtacatgaactttggctctacagtttttcaatctctagagatttcaatcttcgtacacaaagcttgttcgtctggaattagactaaccgctcgaacgctactttagttcgttaatcgtcttagcttttccctagatcccagctcattgcgaccgagttagtttagctcgctgacccagttcggcttcttctgcttgtaaatcttagtcagcatgtcccacagcctgtacgctccaagcttgatacctgtgtccccctccgtcgcctcttcccatattttgtatttgttggccttcggcgccttcatctgttccacaacctggggtcgcggtcaaagtgcttgaacacttgatcggggttgataccgacccggtaaagttcttcggctttgatcttggccagtttttttgcttcttggttaatgccctttagcacattcatctcctcggcatggctgagtacttggttcgaaagtgatttggatcgagtcagcgaaggcaacttaaacattcttattcatccaccgtggtgtcgtagcggtcatcactgtcgccatcgccaaacttgctggtccgcaagaacctgttgcgcttgtcggtgctcgagacgttctcttccgagctcaaacggcccgagaaggccgtcttggagcgcacggcgtcgacgtctgtggaggctgaaagcccatcacagagcacgaggaaaacggctgcaacaaccagcagagcgaacctgaactgcatcgtggcgtggtcttcgggacttgagggcttggcgggggaatacgaagtggatttagactgacagagtgttcggtcccaagaaaaagcgttgggtggctggtgctctcactgtgtgcgccacgtaatcacttcgaagcaatatcttgcattttgtaaggtttcgatcttgtcccttttaagaacggggtcccatgagccccgtcatcacccttcacatattacgctgattattcatacaggcgagagcgcctataagagagtacctccaaaatcattatgaacggggtatggattgtcaaaaatattgaagatctgaaggatttgtactgtaatagtttatcgattcggttttcacagtacattcgttttttgctctctcttatacgcgctctagcctgtatatattattgtaggataaggaagctttctcccaacttggcattccttgcgcttctctgtcattgcatctatccaatcaggacaagttcttcaatgaatttagccaatcacgatcgattcgtgtgtatcccaacattttcctaattattttgggaatttacagtcttgctagaataatatccaatacaaaagtttagtgtaattgttgtattactcatatttgaccgcaaattcccaatacaaatcatgattgtatcgttggtggctgtgactcgtctgctttctctcctctcccatttgaaaagatgcagcgggcgccgagagggcttgacatcccgcaagggacagcagggcaggaggcagcggcgatgaagtgcttcagcgaattcttagctcttgccaacatgaatgaggagtcaattgctagtattgcgaagtcgctgtctattcctgatgctctaccaagtcaaaatgtttactctttgctaaccgccttctccattttcttgcaaactaagccaagtgctcgaggaggccgtcttgctaaggctactgctgtgggctatatgtcccaagttgtgaacctgctccgagagcggtaccctctgtacttgtcagacaccaagcgaattgcgaaaatacgcgacaaaatgggttcaactattgaggagcgaaatttgctagctggcgtgcagactggtgaagctccaggctgcacgctcggcgacttgcgtgttctggtgcaggaaactgcgattaagggggttggctcaggttataagagtttgcatgacgctgctgtactaacgttaatgtggcacacgtttggtcgagcgatcgatacctgttttgctaggaagagccagctatctatggcggcatcgggggaggtctttctgcatctagctcgaatcaagacttcggtggttcaaggcatctcaatttacaaggccgcgactcactgggagcagtgtatgctgcacggcctcggaatgctgttcgtcggagcgtcggagccttccagctatgtgttcccgctagtgccgcacgcggcggcatcggatttgccgacctacagccaagccgaagctatactctactgggagaaccttgaagagaaagctgacccagagaacgagccaccaacaaagcgcgtgagaggaaggcccaacgtgtccaagtatattaacgacgtcaacaccatggtctgcgagcgccaagcccaggcctctgccccgctgcccccgacactcaccgcagggctgagcagccactccttgcgccgcggctccgcatcgtatgcaaacgcctcaccgcagcttgcgatccagtggatctcgacccggggagcttggctgctggactcgctcacgaaggcgttcgcgtacgtgggtaccacgacacgcgaggaccagagtgtcggcaaagtcctcgctggataccgagacccgcacctgccatgcgtcacgcccacgattgccaccttgagcgagcttcttcctgcgctcgagtacgcccagctgctatccctgcgcggccagctcttcaagaacgtcagcggcttcacggacaccacgctcaacgttgacaccttagtcctggatgcggcgctcgcgtccctgctcatccatcttgacgacgtcgcgacggcagtccagtaggagcaggctgccacaggcttcacatcgcattacctgtaccgcttccacgaagctctggacgcaaccaacgtagcgctgggagctcgactctcgctggacacgtgcattggttggggtcggcagcttcgcacggcttggcaaacggagaacttcggacagctgggtgaacgcagcaatggaaacaccaccatacttgccgcagccgtcacccagatgctatcgtccatcgcagcaatgcagcgcacacttcagaagctcgtcgcggtccacgagagcaagtccaccagcgctgacggtcctgctccttgtcgctgtgctggtcaggccccgcaggcgagcactgacaccgtcgttgaagcgcactctcttgctggctgcttctacaactggtacacactggagctgtggcacacggcaacccaaaagaaacaacagtttgttcgcgctgacctcaaggcaggcgtcaacatcatgatcatagcagcaggggagaggtagacgtaccaacggcgccactggaccgggacggcgtcgcgtatcggctgtggaagcagcgtgtctggacgctagcggaagacttggacaagaaggtcaacgctgcgcttgggagtatcgacggtaaaggccgatccaaaaccgcggggtcgctacggaagcgctggagaaagctgcgcgttgaccaccgctctgcgtacgacgcgctctgctcagcatttatcacccgcaaagcgaacggtggcatcgtcgactgcttcacatcagctagtcaccaatggaagcaaaaatacttggagtcgtaggatcacgcagcttgtattaacgcttaatacatttctattcatacaacatggataatcgaattcaaggcgcaaatgcacccgtcatcgccatcccacaacttaagcacagcgcatggattcccgtcagtcccgatacaaagtcatacacaatagaaaaacgctcacataccgtcagcgagcgcgcacgacctcgtgcctggccgacagctaccaaaaccgacagcataacacccgccctgccgggttttgtagctgctttcgacgggtccttgcgtggggcgcgtggggcgcgcctgggggcactcgggtctggggtggtcggcgggggaggcgtgcggcacgctcggagcgcgctgtcgtgttggagacgcggggtggaaagtgtgaaggcggagatggctgcgcagcctgccaaaaataaaaccttaaggttttccttggctttggagccgataaaccagtccatactttgttgaagtcatttggaatctcaattatgattggctctcctcattgggagcggcgtttgggacctggtcgattaatgtacatgtacgacaacaacgcgcccgactcacgttacaggctgtaacttacagcaccaataatacaacgtcacgacagcgcttggtcagacgcattaagcaccttctaatacatattttgctatctttgggatgggacaacacttggaatttgtatgttcgcagttcgtacgaactgtgcttgcgagtttgtcatcaaacgacattaagcaaccttcacgctacactaggcaacattagccttacggtacacaagttgcacaacccagtcaggtttgtcattgtgcaacgttaccggaagcagctaagcagcaaaacagagcagagcaaagcaggcaagcaagcaagcaatcaagcaaggtcatgtattaagaagcagctgctactgcagtcaagagattgactggggtagatggaccgcaataactacaaaggtaaaaaaacatatctacatgtacagcatactgcaatagcaactacaaaaaaacaccgaactgcgaatcaagcgggcttctaaagcccgcgaaccagtatgttcctacaaagatttgtcacgcacgtggcacgcttactacatgtacaagagactttggtccatttggtattgtgctttgcaaactttttggcacttcggactgtaactcgtacgacttatcgagcacgacttatctataaatcgtattcgagtacgaattgctataagtcgtggatagtcaatcagcactaagtagtgcacaaacgccatctcctgcatgatttagcacatccagcatggattagcatccgtttggcacttttagaaagtgccatttccgagccaaaccgggttcgaaacacgacttgagcaacttgcattcaaagcctccatgatttaccactaagtacgaacactaagtagtgcactaaataggagggcaaactggatgcaaaccacaataccatgtaccgatataaaagtttggtccatttaagttagatttggagagagcaaaattagtagttggcaagtttactgtactaagtacagcctcgaagtatgtactgtgctgcattgcgccttctaaatcgatagaagtcggacgtttaagtgcgaggttgtttgacaccttttctgatacgcattatggttctccgatgtatttgaattgaagtattgaatatattcgcaccagaatcagtgaagctgtgcaaatgtgcctgttccgtagcattgattgtaacggtacaatatctcattcacccatttgagattaattatcactactgaccctactaaaatgcatgaatattttaacgatacacccgttaaagaaaagacagtattagaattgccgcccagatcctcgcgcgcggtagtctaaatgaatgtaaattctgaccccctacagtaccaggtcaatacaatcttccccgccgagcgaagcgaggcatcgcctgcagcgtcaaagccaatagattacaaaaccaaaaaagtgttagttccacaatttaacaaaaatctatcgataagtctcatctctcaccgatgaacagtgaagtgatatgaaacgttgaagaccttcaactgctgcagcacttctcacagcgcgccaggctgttggacgaggagagtaatgcctgtagctgtgtcttgacgccggaaacaatctgtaaaatcgacaataatgaaaaacaataactaaaaaattctcggggtcaaagtaactttttagcgatcggcaccttgtcctcgctctagtaacgagaagactggggcacgcatcgacttcagcacgtctagaacgcgctcgatatgagggcagctcaccacctccgtttttctctgcagatcgcagaatcggcaaattttgcttgaatgggtagtattgacgttctcaaggcaaggtcagaatctttcaaactcaaagaaccacccaacgccgttcattccatcttatatctgagtctaaagcatccattgtaattgaagtgttaggtggcttcatctgatcggcttcaaattatcggatgtgcgctgcgctagcagctttactgctatcccagaataatacgatgtactaggaagtagtggtgtggtaatgatcatagagtgtattggtaccagttgtgcattaacgccgatgcctctatttgtaatagaaaacattacgacgaacaacgtaagtattgtgctccctctggtggcatcgtggtcatctgacatcaatctaggcggggctcaatgaacggtgtagcagagaatttctctctccattccagaatccgccacctcaagaaaagatggtgctgctttcaatacagtgcgcgttcgttggtctggcaggaagcttgttcgatgtggagatcgacaatggtgcaacggtgagcaggttgaagcacgacatcaagtgggagagcgcgaatgctttgaaggacgtcgatgcgcaccaactgcagctcttcctggcgaagacaaggggcggcgcgtggctgcgcgatgcggaccctagcgtgctcgagttgaagaaaggaagggtccatcctgacatccagacgatggtcgatggagagatgatggagcaggcgtggacattaaggaggtgctggaagagaattgcatgtgcgccctagagtcgaaacaaatccacgtgctggtgaaggtctccacaccaaagcgtcactgaatcctgtccaccgctttcctttgacgagaagaagcccattattcgaatcccgagagtgtataccgacggcagcggggttaacatctgccacggggatctgctcttataccagcgagctgaagtccaggcgcaattggaagccatttgggtctctgttatccacgtacctgccatattgtggattgtagggccgcctggaagtgggaaatcgtgcgcagcatttgcattcgcttgctctctgtctcgatctggcgaggaggaaggaaaagtggtggggattcattgccgcagaggactggggaccttgctgtgcgttcagtttagcggtaaaagcaagaaacaagcgggtattattgatgcagatgaagtggaaatgttgcttgcctcgctggagctgtgtttctggatggctacgtacaagcccaaagtgattacgcagaaggccaaagtgattccgtctacgagtcgtgcagaaagtggcatgagagggaacgggagcgtcgccgcctcgtgattgtcagttcgatggcaaaacctggaacgaacttccgctgtgataccagtgccgtcgtaccggttcaagtattggacggattgaagagtatggcgatttcccccaacaaagtccagggcactcgagccttactggaaaaggacgaagtgcgagaggaggagtgtttccatttgacatcatggacgctggaagagtatcaggaggcgctagcggacccattgtttttcgaccacgtgagggcaaagttcaccgacgtggaaggcgaggtgacagttgctgagcggaaccgattgctatccagcaagttccatgtcgttggcgggagcgcgtgcttgatgtttggtttcaaagttgaagttgcaaagtatatactcagagacgcgattgagaccgtgtatgacatcgaaagtctcaaaaatggagtgatgggcgcgctgccttcttctctgctgatcgcatggtatcgaaccggcaccgccagtcatcgtacaggaacttatcggaactgggatctaccagagaaatggctgttgagctcgtttgtggcgagagagctcgggcgaattctcggtcctggtaagctccgatcaattgcgcgctgcatcgtggacaacccctcgcatgatggacgcatgtttgagctgctggacggcaatgcagcgctcaattaaatgtcttctctctcgctgtcgcgttattatattattgcccggttacatgctatgtgggtcgctactatatttttttatctgcttcctggtggtttgctgacggagctgtagcccttggcggcctgcacgatctcgcgcgcgatcttcttctcttccttgagctgcagcagcttctccttctgacgcgcgttgttgagcgcgtcgtgccgcttcagctgcacgcggcggcgcagctcctcctcctcgcgctgcttcttcctctcggcctcctcggccagcttgaactcctggtcgatgatgaagagcttggacttctgcttgtccaggtccacgatgcggccgcgctggtcgatcagcccgagctcgttcaggtggctttgcagcggtcggctctcgaagtggtggcgcaggttccggtccagcagcgcgttgtactgcggcagacgctcctggtgcacgcccgacaggttgaagccgctctcgcgctgcttgaggtactcctcgctcttcttcttcgacatggaggtgccaaccatcctctctcttcctctctctctcttggtttgtttcggaatgatgcgctctcgtcgctcagcagtccgcgataagaccaagctttcatgtcgttccagaatctccacgcgctatttcaaggtccgaaaaaaataactttcggtcatcacttggacgttgaggcagtggagacggccacccccatccagttcgaggcatggaggcgctcccacggcttccagctgttgatcaggcgctcgttcgtggactgacgcacctcgaagcgcaacacgctgtctgcagtgtgttgcttgatctcggctaacacgcgggtgacgctctggactaaggcgaagtcggtctcagaggcctggctctctttttcttcgtcaagctgctccggggcatgagtggaagcctcaaggagcaaagacttcatggttttcagcaactcgcgagtcagatacaccgtgcggaaggccttgtcgtcgctcttcatgttcagacacgcgaacgcgaccacatcccgagggaacataaccttgctcgacccgagcagcggcagcaccttgaccacactcccatcccagcgtaaatggcgattcggaggggtggattcggtttctccttggtcatttgcaatggtctcacctccttccacgtgagcctgaaggtcttgagtcagtcgctcttgctccaccacctcgatgtggtgctcgttcgtgtactcttgggacggcacgaagtccatccgcaagatatctcgctccacgtacttcttgagctgcgtcagctctcctgcaaagttactggaaggagcttgtgacggaggcccgcgagctgtagagacgcctaactcgcgctggagggcgtggaagttgtcccagaacggggacttcttggaggggaacgacacaatctgcgtgctctcaaccaagacgcagtctagaactcgtagctgctcgtcgtagtgcgatacctccagtccactcaggcacagaattgcgccctctttccagatattcttgttgccacggcggaatacgaacgaggacgacgatccacgcttcaacggactgtgtgccttcgtcttcggcatcgtgacctccatgccagacacgcgaatgctcataaggtggccgctttggtccgtcacgaagacgtgctcaacataccgagactccttcggcttcagcgcagggtcgaggagcgagacttccgcctgcctcttcgctgcgacactggactcgtcctgcgtctcgcgaccggtaactagcacaacacaaacacagacgtcgatcgtcggtcgtttttcgtttctgcggccatccaatccattctcgaagttggttctgtaatccgtcgtggcttgctggacgtcaacacacgctcggcgactccgttccacttgagtattgccgttctctactccatccgtcatcgcatcttcctctggaatttcctcaaacccgctgtgcttcgtggagctgagtctcaaggacgcatcctgtccacgcccaccatcaagcttccagttaacagtcaagctactggcgaagtattcgacgccttccttcagaccaccggacagcagctcctccgaaggcctccagatagtcaaaatgccgcaacccacgccttgattctcgttagcacagggatgtgtgcactccacgtccaccttgataaatggtattggaggcggcacgtcgatttgattgtcccctcccgaccactcgtccatcatcatgtcgccatcatcccctttgtggtttttctgcatcgccatccgcgcatactcggaacgaagctggtagtacaatggtaactgatcctcgcagataatccgcggccctagcgtccactccttggactgaagatgcagaactggagaaacgcggagcactcgaacgcgcactgatcggatcatcccgccaccgacctctaagcttttcagaggcacactctttagcaatgagaatgtaagttggggctgctgttttcggtgtcgtgatgttgctggagtcacgtagtgtagtttctccacgcccagtcgggtatcgaatcgtacacggcgcgtgctgttgtagcgcaactggaggtacggccactgcgtcaagtcctctttagccagcaacgggttcttccagtgtgattcacggacgatcgcgcactcgagcgggtcgattccctcagtggaattttgcagagatgcattccacgttgcgagtttagttccaacgagatttgacttggaatgaagcttccagagtaccgtcgcaaggggggcgtccgggacggcgtacacggaataccatccatctgtgaggacgagagccatattccagcagggagggagttcctggtccactgcggtgttgttttccgcagggaagggaagcaccgcggctacacagagaaccatacagcttagcgagctcgcatctcgctggagaatcttcttgacgatggagccctgcgcattgttcaagtcccgctcgtatcgatgcatcacctgcttcagactttggtccttcgtcaagtatttctccatcagaagacgggggaaggatcgctccgtggcagccaacttccacacaatccatcggtagtgattcaggaaccacgcaaacgtcgctcccgtgcttttgagaatgtagttccctgctctgagctggcgatagagctcacgagggccaatcgtggcgtcatcggaactttgaggggagcacactaatctgccatcgtgagtgaagcgtacatcaagagcattttctgccgtgatactgtccagcacttggaagcgagacatatcacagccccctccagtcatttcttgatcgagctcacgatcttcgcgtagcgccatcagaagggagaacgatattttcatggtctcctcataaataaaaggccggccttcagaccttcttgttttctgcttcttgttcattggggctgtaggaacgcaaggttctcctagaccctttgaggcgacgttgtccagtttcttcttgcttgcaacaggcgggcgaaatcgctttgtcccactcaagcttgtccgagaccccaccgatggtttcaaaggtctccttgcctgttgctgccgtgaacgctgctggccacgagtctgggaggtcaatctgcagtttaattgctttgatcccagtgatgcttgccacttcgaagcttccaatgcggccgtttgtcgaacgagcacgttttcaggatgcacattttccttgtcagcacctcgggcatgctgagaggggatatcacttgatggatttgtcatcagccgcgaccgaactgaagacaccgcagcgccattaccaccattaaagctagcgaactcgtttaagggtgctcgtaagagcccacttgactcgcctggcgaatcaccaagggacgacgcagtccaaggctccttatccatgacaccttcgctcccagctgcaccaacatttccaacacgcgtgttatcatccacatcacatagttgcctcacagcgctcaacgtcaccgactcctccgccgcttgcagcttcgtctcgtacgcctgcagccgctccttggacaccgacaccgcgcgtccggaccccgtcgtgaacagactcgtcaccatcgtggagctcccgccacgcccggcgccgccagctccgctcatatcgccaccggcaggctgcgtcgcagcgctcaacgccaccgactcctccgccgcttgcagcttcgtctcgtacgcctgcagccgctccttggannnnnnnnnnnnnnnnnnnnnnnnnnnnnnnnnnnnnnnnnnnnnnnnnnnnnnnnnnnnnnnnnnnnnnnnnnnnnnnnnnnnnnnnnnnnnnnnnnnncgtccgcccggcgccgccagctccgctcatatcgccaccggcaggctgcgtcgcagcgctcaacgccaccgactcctccgccgcttgcagcttcgtctcgtacgcctgcagccgctccttggacaccgacaccgcgcgtccggaccccgtcgtgaacagactcgtcaccatcgtggagctcccgtcacgcccggcgccgccagctccgctcatatcgccaccggcaggctgcgtcgcagcgctcaacgccaccgactcctccgccgcttgcagcttcgtctcgtacgcctgcagccgctccttggacaccgacaccgcgcgtccggaccccgtcgtgaacagactcgtcaccatcgtggagctcccgccacgcccggcgccgccagctccgctcatatcgccaccggcaggctgcgtcgcagcgctcaacgccaccgactcctccgccgcttgcagcttcgtctcgtacgcctgcagccgctccttggacaccgacaccgcgcgtccggaccccgtcgtgaacagactcgtcaccatcgtggagctcccgccacgcccggcgccgccagctccgctcatatcgccaccggcaggctgcgtcgcagcgctcaacgccaccgactcctccgccgcttgcagcttcgtctcgtacgcctgcagccgctccttggacaccgacaccgcgcgtccggaccccgtcgtgaacagactcgtcaccatcgtggagctcccgccacgcccggcgccgccagctccgctcatatcgccaccggcaggctgcgtcgcagcgctcaacgccaccgactcctccgccgcttgcagcttcgtctcgtacgcctgcagccgctccttggacaccgacaccgcgcgtccggaccccgtcgtgaacagactcgtcaccatcgtggagctcccgtcacgcccggcgccgccagctccgctcatatcgccaccggcaggctgcgtcgcagcgctcaacgccaccgactcctccgccgcttgcagcttcgtctcgtacgcctgcagccgctccttggacaccgacaccgcgcgtccggaccccgtcgtgaacagactcgtcaccatcgtggagctcccgccacgcccggcgccgccagctccgctcatatcgccaccggcaggctgcgtcgcagcgctcaacgccaccgactcctccgccgcttgcagcttcgtctcgtacgcctgcagccgctccttggacaccgacaccgcgcgtccggaccccgtcgtgaacagactcgtcaccatcgtggagctcccgtcacgcccggcgccgccagctccgctcatatcgccaccggcaggctgcgtcgcagcgctcaacgccaccgactcctccgccgcttgcagcttcgtctcgtacgcctgcagccgctccttggacaccgacaccgcgcgtccggaccccgtcgtgaacagactcgtcaccatcgtggagctcccgccacgcccggcgccgccagctccgctcatatcgccaccggcaggctgcgtcgcagcgctcaacgccaccgactcctccgccgcttgcagcttcgtctcgtacgcctgcagccgctccttggacaccgacaccgcgcgtccggaccccgtcgtgaacagactcgtcaccatcgtggagctcccgtcacgcccggcgccgccagctccgctcatatcgccaccggcaggctgcgtcgcagcgctcaacgccaccgactcctccgccgcttgcagcttcgtctcgtacgcctgcagccgctccttggacaccgacaccgcgcgtccggaccccgtcgtgaacagactcgtcaccatcgtggagctcccgtcacgcccggcgccgccagctccgctcatatcgccaccggcaggctgcgtcgcagcgctcaacgccaccgactcctccgccgcttgcagcttcgtctcgtacgcctgcagccgctccttggacaccgacaccgcgcgtccggaccccgtcgtgaacagactcgtcaccatcgtggagctcccgccacgcccggcgccgccagctccgctcatatcgccaccggcaggctgcgtcgcagcgctcaacgccaccgactcctccgccgcttgcagcttcgtctcgtacgcctgcagccgctccttggacaccgacaccgcgcgtccggaccccgtcgtgaacagactcgtcaccatcgtggagctcccgccacgcccggcgccgccagctccgctcatatcgccaccggcaggctgcgtcgcagcgctcaacgccaccgactcctccgccgcttgcagcttcgtctcgtacgcctgcagccgctccttggacaccgacaccgcgcgtccggaccccgtcgtgaacagactcgtcaccatcgtggagctcccgccacgcccggcgccgccagctccgctcatatcgccaccggcaggctgcgtcgcagcgctcaacgccaccgactcctccacttcattttcttgcgcaatcttcccattttcactcatctgcgtcgacgtcgcagccgctaagaaatcgctggcgctggcgtccaccactagcgacgcttctgcactcgccgtcaggctccaggtctcgctgctctgcgtgaagccgctcaagggcggactaggaggatccgccctcgccgactgcgacgcgcctgtgcgccggcgcttcctgctggggctgcgcgcggcgcctctgttcctcgtcgccctccggcggctgcgcgcgtgctccgcgtcctccagcgacaggcgcgcgaccttctcgtcctggaacatgaggatctgcatggccgtgtcgaagtcctgctcgaacaccagcagctcatcgaacgccgcccgcagagcggcagcgccgccggccgcctccattctgccgcgctaattgacctatgctgcggcaactttttggcgccttaccggttcataaccgatacgcagctgtgcttaacagctgtgccacatacttaaccgttattcgtcgcgttatctaactagatcgaagaggcgcagaagccgtaacgagatgccgcagcctgtgcttgacctggggctgctgactgcggctagcaaggatgcagctgtgggcaggggcgaggagagcaagttcgacgatgtcatggcgctgcaagaagagcctatcaaggtacgatggagataagtggtacatgtacatgcacgcgggctcggccgtactaacgaggtggtcgatcgagtagatcactttcctgctcccagacgactcgacggtgacgaacgaggtaaggggcttcaaagtcatcggccgtcgctgtgtggacgtgctgaggtgttgtttgttgggctcgtccagttcaagaaaggtcacaccattgccgtgctgaaggccttcctcgaggacgagtacgacctcaagcaggagcaaacggtgagggcagttgcatgttgcacgaagggttcttgttggggtaagttagttgctgacacgtgcactgtacgagcagcaactttgcctgaacggggccacgctgctggacccgttctccttgacggacttcccgtgcgtcttggaagcgtcggcgatcgacatccaggtgaggcgcagcggctccggcgacgccaagagcaggaagtgaagcaaacaacaaagatggagctggtggtacgaaaaaaaaactggtcgaattgtctatgctagatacagacttataatagtttgcattggatcctttccagttttgtttgatttttcgagctcgatgtacaacgttttgaacgtctaagacctcaagcaacaaccacgatgttgtataaatgcccctcgggcacagtgatcgcgcaaaaatatgtgttttggctcactcatcttatgcggcagtgctcagtgagtacgtggaggccacgtgcacagcaattgcttcggtcaacgaaatccgacacatcgttactacgctggtctgttgaacagcgtctggcttcggtcgtgacgaatgtatcggataccacagacgcaacccatgccagcacaaaatccttgggctcaccattgagttggctcggcaaattttgtgaaacgccacccgcgccatgcactgcagcctgctttcagaaaacgcacccagtcgctgaaacttgctgcagcatatttttgctgtccgtgcctgctcgagctgctcgtccacagacctgtgcgggtacatatgggttcgcccagcaacggcttcaagcacatgccttcccgccgtcttccggggattcagggtctcgttccgctagctacaatagctgtgcctccctcgcctccattcccgaatcctctctgtccaagcctcattgatcagctctcacttctcgcggccgaagcatgcgcctccgaggcttcaatctgtggactggagcactgttggctctagcggcccacatcgctgcggctcaaacctacgatgccatcgtggtgggcagtgggcccggtggtctcgtggcggccgagtacttgtcgagggacccgaccgtctccgtgttgatcctcgaagctggtccgaagtctctggctgccactggcggaaccgacagccccagctacgcccagggcagcggcctgaccaagtttgatatccctggtgaattcgacaacaccatctacaacgcggctaatgagcagtaccgagtggactggatcaccgacgcctacatgtggctcggtaagcttgtaggtgggtgctcgtccatcaacgccgcgctctacttccgtccgccggacgcgtacgtcacgcagacccagtggccattttcagcggctcaaatggtcgccaagatggatgagaacgagcagctccacggccacacggacaagccttcgagtaacggcgtctggtacacgcaggaaggatacaacatcgtctcgaaggcgctgctggcgaagggatacgcggagcgtaccatcaacgacgctagtgcccgcaacagcaagagcaagacgttcggtcacgccccgttcaccttcaagaacggcaagcgcgacactcctgccgctgctttctggggagcgatgagctctcgaagcaacgtaaagctcctcaccggagccaaagtcgattatcttctccgtgctgcgggtggcaaggccactggcgtcgtctacaacggcgggacccaagcgcttctgtcggctcgaggcacggtgctcatggctgccggagcgctgagtacgcccaaggttttgattcagagcggcattggtcctgcctctcagctcaatcttctaaacggccgcaatggcttcgctggagtctcccaagcggctggctgggtcacgaatgccaacgtggggcggaacctcttcgacacgaatgtggtgtttgcctccttctcgcacccacagatgagctcgttccagttcaagaaccggccgacttcagcgacagatcaatacatgagcagcttctcaggtccgtggactagctcaggcccaacgctgatcagctacgagaactacgatgtccaaggccgcgcgtatgagttccagtccaccgcgctcacgaccggattcggcgagttttataaccgcggggacgccttcacgctctcgctgtacgtgaacaaccctgaaggtcgagcggcctcgggattcgacagcaatggcaactggaaggctttcaatgaaggaaacgcgtacttcggcactagtcgcgacctcgctgcgatgcagtcgtacgcgcagaacgtcgtcaaggcgatggtggctcaaggcgccaccttcctgtctgcttctgggtcagatgacactaccgtcgccaactgggtccagtcctacggcgctcggatcactcaccacttcggcggtagctgctacgcgtccagcaataccgcggactcaaaccgatgtgccgatgaaaagctgcgcgtcattggcatggccaacgtgttcgtggcagacgcgagtgccatgcgcgacggtactgtgggtccgtacagcttcatcatgtacattggtcgtgaggccgctgaccaagccaagagctacatagctgccaacggtaatggtggcggcggtggtggcagctcgaactccacctgctcgagctttgagaacggcgtggactatctgaacaacgatctgagcaatgctccgagttcagcagcttccggatgctgcgctatttgctcggccacctcgggttgcaaggcgttcacgtggaccgacaacgccggaggcacgtgctggctcaagtccggcaagggaagtacccaaagcaagagcggcgccatttcggctgtgcttcagacctcgtcgacgtctggctgctctacggttgaagacaacaccgactacactggagccgatgtcggcaacaagcccagcgcttctgtggacgggtgctgctcgatctgcacggcgaccagcgggtgcggggcctacacgtggacagactacaacggcggaacttgctggttgaagagctccaagggctccggagttaccaaaagcggtgccaagtctgctgtggttagtggatcaaccgggggtggcggcggcaatggtggtgggggttctacctcttcctgcactgcgatcgaagagggcgtggattataccggcaacgacttcggcagtgcgctcagcggtacggctgagggttgctgtgctgtttgccaggccaagactggatgcaaggcctacacttggacgaactacaattcgggtacgtgctggctgaagagtggcaagagcggcactactagcaagagcggcgctcggtcagctcaagtcagctcttcttcgacggccacgtgcactattgtgaacgacatcgactacaaaggcaatgatctctctagcacccccagtgctcccagtggaactggtgctggttgctgcgatatttgccgtgcgacgtcaggatgcaaggcgttcacgtggaccactcagagcggaggaacctgctggctcaagtctgcgcaagggaccagctcgccccttgtcggcgctgtatccggagccatctaacttccatcagctccagccaagaccttctttctacttacatgtaaatgttggagaggacttgttctcccactcatcaggcactagcaaaatgataaatgtatgatcttggtgtatcttcagaacgggtgccgagatcaatagtgaatccgattcgacagatctaaacggaaatgacaaagaacagtaaagacccaacgctactgtcgctgctcgacaacgccgagtatagggcgcgctgctgtcactgataggcgccatgtatcaacgctctgtcgccgcaccgaccagtccgagtttcgcgagcaaatgtttgaatgacgaagctggatctaagtgacgcgagacagaaaaacatttcgagacttggacgactgatgcaagtgagggcactggtgctgccacccgaaccaacgaagatttattcgtcagagctgaagtgtctgcgattgattcgccgtctctggggcaaataacgtgcccgaagtcgatttctctgacactctcgggggagtaccctggagtccaggaatggactttgtccacagaaaccctcaccttctagagcatgtcacctggaaccccttggcaacactgcgcttgatcttggttggtggtggatgctcagctccagaatcttcacttcgaaattgcgccctagcctggacggactcatgattgtagattttaccaggagagcgagtcccttggcgctttggccgcggtgcaatcaacagaaacatgaagcgcctggacatccaaggcgtagaaatcgataacatcgagtttgtgcggtatgtgcccgacctcgaagtgctgcaaattgacaacttccttgcagtagttattcacgtgctaccccatggtcacacggacgattgaacgcccacgcactgagtctgtgttttatcgcaacgggtataggcgcgctgaccgaatagaacaacggtgcctacgcgttgtagtacgacagcgcgaaacatagattgcttggaacttcattcaaatgctgctgctagctcattattagtccttaaactacacagtttgaagtttttaaggtagatgacaatcgggtaatccgctcgaggtgaactgggcttcatgtacgcctggaagattggagtccctagcccagtttttttttatcggtggagcgcgggggtagaacttcaatttgaaactgttaattcgataatcgaaaccgcaaaatggataccttttcacttgcaggtgcgtctagcgatgcgccttcagttccaactcatttccaatttctcccccaaaacccccaagctccactccttccagcagcatgcagtcaccgctgccttttctgagctcttggatttttgatgaacctctgtccatgagcatgaacatgaagttcctgttcacggtcgccaccgcgaggctgctggtgaagatggcaacgtcattgcatcacaaactgcgtattgcgcgtgggttggcacctctaagcgggcccccaggggtttggctacttggcaacatgccagcgtacatcaagaaccgcgaccgcatgtaccatttcttggtaagtattgagcattttgtcgctagtcgattcaatgctggagtctaatgatgttttgtgttttgttgcaaaccaggaggatctgcttaagcagcatggcggtcgaatgaagatgccgtggcaccttttcttcgatggagccatctacgtgcgtaacttgttgcattggctacggcgcggttgtgtgttctaattggcgtttgctacttagatcacggacccgaaggacgtccagcacatcttgtcgaccaatttcgacaattacgtgaagcctcaggggtttctggatgcctttcaagagatcttcgagaactcgttcttcgctgtgaatcaccacgcccaggctccggatggaggtgctggttggcgactgcaacgcaaagtggcggcgaaagtgttcaccaccgccaacttccgcatcttcaccgaacaagtatttgccagacacgcagaggagacgctattggcagcacaagccgaagcgactgagtcgagagctcgagaggatcctgacgagcgcttctgctgcgatatgcaggagatcagtgccaagtacacgctgaactccatcttcgatgtcgcctttggtctccctctgagcgagattgaggggacggaaaactttgcggagcacatggggttcgtgaacacgcactgcgcacagaggctctttgtcaaacagtactacaagctgcttcgatgggtcatgcccagtgagcgagagctacgacgtcgcacgcgtgagattcgggcagtcgctgacaccgtcttgcttcgtcgtctacaagaatctcaagagaaaatcaacgcacggtcagatctgctgtcacttttcatccgcaaggctcgggagcttgctttcgaaagcaccaaagaccagaaggttgacgctgcgtctttgttggggcctaaaacgctgcggtccatcctcttgacgttcgtctttgctggccgagatacgacagctgagtgcctcacctacagcttctacgcgatcgctcggcacccgcgagtccagaagcaaattgtggaggagctggagtcgaccaaggagaacactgggtcgactcacgcaactttcacgtttgatcaagtgaaagagatgaaatacctcgaagccgtcgtgtacgaagccgttcgattgtacccagcactacccttcaacgtcaagaacgctgtgaaggacgactaccttcccgacggcaccttcgtccctgcaggcgtcgacgtcgtctacagtccgtggttcatgggtcgcaacggcgagctttggggcaatgatccgctcgaattccgccctgaacgctggctggagatgcccaagcgcccgagcgcgtacgaatttcctgcctttcaagctggtccgcgggtgtgcttgggcatgggcatggccgtgttggaggccaagctcttcctcgccaccacactcagtcgttttcacgtagccatcgcacctggcgagaagcaggagcgaggctacgtgctgaaatcgggactcttcatggacggcggtctgccgctgcagatgaccccacgacctcagtctgcagcatcagcttaggactgcttaacctccggattgtcgacaacataattcatttcattcactgcctgcaataatggtaaggtcgtctcaccacttcaacatgagcgtgagccttgacatagctccctaaaattagcggactttggtgtcgtttcttggcggggtttcgacgcgcaggggcctgggtcgagagccataaacagataaacaaacttctcgctcacaggacgcgatcgtctctaggaacggaaggaatggggctcttcaagctgctggcgagtgcgttgggcatcaagaagacccaggtccgcatcctcgtggtggggctggacaacagcggcaagacgacgctcgtgaaccacctcaagcccaagaagagccaggcgcgcgaggtcgtcccgaccatcggcttccaggtggaggagttcaccaagtccaacctcaacttcaccgtgttcgacatgtccggccaaagccgctaccggagcttgtgggagaactactacagcgacgtccaggccatcatctacgtgctagactccacggacaccatccgcatgtgcgtggccaaggatgagctcgagcagctcgtggagcacaaggagctggcgtccaagaaagtccccatcctcttctttgccaacaagatggacctgcccaacgcgctcacacccgtcgagtgcatgcagctgctggaactcgacaaccttggcagcaaatcctggcacattacgtacgtgaccgaagtcatgctcttgaacgccatacgcaaggtaaccatttttgtatcttgttatgcacgcgcagggcaagcaatgcggtaaccgggcgtggagtggaagaaggcatcgagtggctcgcagaccagttcgccaaggggaagtcccggaagtgagtcaacgcaccagcacagaacaatattttcagccacaatgcttctgctagagagtagctagagcctttgacaacccaatgtattgcacttcaaccctggttcgttcgtgtgcatcgagtaaggcaaagctaatagattagggtgacctaggagagtaaacttgtagagcctatagttgatccgatctaggcaacaaattgcctacgcgtctacatcgactgctcagccggcgcagggggcgccctctgctgctcgttggacgtggcattgttggccttgggcacgggcaggaagagcttgaactcgggcggcagctcctcctccgagtagaggcggtcggagaagtagatgcggcggatgcggcagttggcgtggatctgcacgcgcagcgtctcgatgtagttggtgccgtaagcgcgccgcgtgaagtccgagaggttgaactggatctggttccagccttcgtcgagccgcatgggcatggtgcagatgaagggcttgacccgcgtggagctctggtagttgctcgcgcggaagcggcggcgcacgttcttgtcgtccagcacctgcacctcgaaggtgaagtacttcttgaggttcttgatgatcatgacgaggaacggcagcttgatgcccagcgtcttggccggttgcgccgggcacgtgatgaagttggtgctgacgttcgtgcccatgatctccagcaccgacgactggatgtcctggtccgtgatgcgcttgatgtggccattgcgcacctgcttgtcccagatctgcagcggcttgctcctgcagccagcgtagacacaagaagagcattgagtcaacttcttcctccatatacagcgctgacgcacataggagggagaggcagacagagactcacccgatgctgtagaggatggaaaggaagcccgactggaaggtgttcttgaacatggcgcggaagagctcgtcggcgtgccgcagcacgttgggaatatgcagcctcggagccttggagcgcgacgccgcggactcctcggacggttatcgttttgtgcgtcgcttcaaggtcgcactggtgtggaccacaacatatacggtacattgtggcgggtttatttgaaacgggccgacccgccacatcgaactgtttgtggcatgtagtctaagccacattgtggcacaaccactggtggtcatcgccatcccatggcgtccgcggtgcgcgtgctgctctcgtcggagcacgcgccgtccccggtggctgctgcaagacctcccaagcgaaggcgcctaaatgaagcagcaagcaggttactccacgtggcgaaagcgccgactggaaatgccgcagcgcccgacacagagatggcaagcgacgacgacgacgaaagccccggttgtgtgtgcgccgagtgcggcgatgccttctcgtgtgcagcagagctagtggcacacagccaggagacgcggcaccggccctttgcctgccgccgcgagggctgctccaagcgctactcgaagcgcgagcacctgacgcggcacttcgaggcggtgcacgtccgcggctcgacgcagacgctggaggagcgtaaacccttcaagtgcgagctgtgcgaggccaggttcacgtacaaccacgggctgacgcgccacaccaagcgctcgcaccgcaacgtgaaccgcccgttcgagtgttccgagtgcctgaaggtcttcaagaagaagagcgagctgcaagcacactcgtacgcacacacgggcgtactccccttcgagtgcaaggactgtggcgagaggtttctcaagaggttcttgctgaaccggcaccagcggacacacgcagccaacagggaggcggacacgcagatcctcgtgtgcgagtgcggcgagatctgcttcgacgaggacgagctcaagattcacaaggaggcggagcacggcagtgaaaaggaaccgagtgctgcagacagcgacgcggccgccacaaagcagccctctacgccttcatctgcccacgtgtgcctcgtgtgtgaccagacgttcagccggaagcagtatctgcgcgctcacctgcgaacccatttcgagtcgctggacgaccgcaagaagtacgtgtgccccatggctggatgtgacaaggcctacacgcggtcgtccaacctcatggcgcactacaatgcggtgcacgacgagcgtaagtcgaagcgcttcgcgtgtccgcgtgagggctgctcggcgcggttcggctacaagacggtgctgaagcaccacctccagagcattcacgacaagcccaagacaccgaagcgacgcgagcgcaagtccgcgggcattcttgaacgtgcgctcggagtgaaccaagtgggcgagcaagtgacgcggaccattgtgtttgaggccaagacaccggatggtgaagaagagaaggaggcggcaggacagtcgtagcgcgacaggtacactttgtagagaatatattttattgagatacgatagacactgctgtcttggatgccaggcgatgacaatgcttcgtgttcattgcagactttgctatggtgacgcaacagttcttccgatcacgcacttgaaagctctgttgcacctgtagacgtagtatagtagacgtctcaaacctgtgtctgatcaccgtgaaaggtcaacaacaagcatacagtacgtactctggtcatcaccatcgagctggtagacgtggaggcgacgttcagcctgcaaaactgtagcagtctgcaacgcttgcaagaacttgcggctgatcgatatcaaagttaggcatcgtgtgcgtacaacttgccagcgggtgtcaatggacaagtataataggatgcagctgataccgacgttgactgcataaaggccaggacatcgaaaccacgcacgcgagggtagttttcacaaaggcttctttgctttagctcgctcgcgaggtgttgatggcagctctgtcgccacgctctagcctctctcgcatactacagtactaacttacaacttggggccgaacgaggagtagtcggtgacgccgggcgacacgtacttcttgaagttgtccacgaacatgccggcgagcttcttggcggtggcgtcgtacgcggccttgtcgctccaggcctcacgcgggttcagcacgttctcggggatgtcgccgagcttcttgggcacactgaagccgaagttggggtcctccgagaactccgagtccttgatggagccgtccaggatggcgtcaatgcaagcgcgcgtgtccttgatgctcatgcgcttgcccacaccgtagccgccgctggtccagcccgtgttgacaaggtacacggacgtgttgtgcttctgcagcttcttctgcagcaggtcagcgtacttggtggggtgcagcggcaggaaggcagcgccgaagcaggcgctgaacgtggccgtgggctccgtcacgccacgctccgtgccggcaaccttggcggtgtagccagacaggaagtggtacatggcctgaccgtcgctcagcttggacacgggcggcagcacaccgtaggcgtcgcacgtgaggaacacgatgttggacgggtggccgccgctcgaggtgggctcgtggttcgggatgtggtagatggggtacgacacacggccgttctccgtcttggacgtgttgtagaagtcgggctccttagtctcggcgtccacgaacgtgttctcgagcagagcgtcgcgcttgatggcgttgtagatgtccggctcgttctcctggctcaggttgatggtcttggcgtagcagccgccctcgaagttgaagatgccctcgtcgtcccagccgtgctcgtcgtcaccgatgaggtaacgctgcgggtcggcggaaagagtggtcttgcccgtaccggacagaccgaagaagagggcggtgtcgccgttcttgcccttgttggccgagcaatgcatggccatgatgccgtcgagcggcagccagtagttcatcatggagaagatgcccttcttcatctcaccaccgtaccacgtgccaccaatgacagccacgtccttctcaatgttgaaggccacaaagacctccgagttgaggccgtgcttcttgtagtccttgttggtgaccttgcaggcgttgacgatggtgaagtcgggctcgaagttctcgatctcctccttggtctgcgggcgcaggaacatgttggtcacgaagtggtgctgccacgcgagctccgtgatgaagcgcactttcttgcgcgacgccgggttggcgccggcgtagccgtcgaagacgtacaccttctcggccgagctgtagtgcttggtgaccgtctcgtacagctcatcgaacacctcggcgctcacaggctggttgatgtcgccccaccaaatgttctggctggacggggcctggtccacgatgtacttgtccttgggcgagcggcccgtgaacttgcccgtgtcgatcgtgtacgtgccgttcttgacgaactggccctcgccgttcttctcctcgtgggcggcgatctcgtcgtagctcaggttgcggtgcaccttggtgttggcgttcgtcacgccgaacttctcgatgccgagcgacgcggccgtcgcgttggcgaacgtgcgcagcgcgaagggcttcgcgaaggcggcgggcgtggactgcgccatcttgatggctccgaggcgctgcacgcgcaggctggcacgcagggcagacgtgaacatcttgcttgagcttctcgaggggcttcggcgggacgcggcaaattgagatgtgagccgctcaaagatataagggcgcggctctcggagcatgctgacgttgggcgccgtccgtttgggccaatggtggcgcggcgtgcagaaaaacgcgcgatgcaggctggcgattggtcaaacggagaacttcaaccatcgtggccagcagagaccggccacgcacgacgcgcgccgggctgctggccatcggtgcgccaagttcggcggcgcgaaacatcggcgcgtcacgggccggacgtgctgcaattgcagttccggccgcgcaaagcgcaggatggcgcgacaactggggcgcggcgccggctttcggggccctaggcgagccggccgggctcacggtgagcatgcggcgccgggccagccgctggcccgcttgctcgccgcccgcaaagcgtgacagcgccaccgtcgacacgccactctggcgcgcgtctattgcagcgccgagcggatttgaaagcctccagcttcagcctctgcttcagctttgatacattttgccttctgaacttccgctccgtcacatgcgaaagtgtccgcactgcagtttcccccgcagacaagctctcgacggtcgactccttctgtctgggggctccgagggcgagtcaagcatcggcatcgcgtctgcccgcttgttaaaggtgaacacgtggaggcatcccgccaagcagaaatggctgcagacgcaaagatacgctcgcgagccgcgctccaagcaccagcctcgtgaccaggagattttgcgcaccgagtctctacgctgcgcacgatcccctgctgcctccagggcctcatcagattgattgttccgctcgcggggagcgccacaagagcgtgctgcgcggcagcgtggtcaccacgttccatcccgccgtcgatcgcagtatccgacaagctggtctgcgcggagtgctcgttgttccagcctggaacttccgacatcaagcttacaccttctagtctagacaggtccattgacgatcagaatggtgaaagcctggactggaaggccggagtggcggggttgcaatagcaacaaggatcgtcatgaggtgcggcgcaagtatgaaggacccctgctcgaaactcttgcagcgattgccgaacgcgtcaacggtggaaaagacgcttgcagggccatcggaccgaacgggcggctttcgcgctgtaccggaacgtatttccgcgcagtgtacttcctgttgtcaaagcagtgcagtacttgcagtgcatgaactacgaataactccttgagcgtgctgcactcggaagtatgatgttttgatacggtaaatgtggcggcaagcatgagcttttcaccgctttcatttgcgactttcggtgcggtcatgccacttctggcaaaccggttgcgcgctgaatgctctggttgcatctactagtagcaacgtttgctacacaatatactacaagtaattggcatgttgattcgtgcttgtgagcgggctggttgccccgctggcgagcaaacgagcaaactgcagacgaaaggcaacacgcacgttgacagtggagttgaagtttaccgaactgtactggtacattaccagtactactgaaatcaccgaaatgtggtgtgtcgtacacacaagatactttcgcgtcacatttcttgcccggcggcgctattactgtagcccttcgccgacggcgctagactcagtggcggccatgctgcgcttcccgagggaccgcttcctcatttgcctttgcggtgtgtattatgcagccttcgcttctatccgctcacaagtccgcggtctctacggcgagtacgttcccctctagatacatttcttgctcttgcagcaccaagtatctgccgattggacgtccccctcccgaagcagcttgcaatgcagactgtctgaccgactgatttccacctcaaaagactcggcagccgcagcgctctagccgcctcgacgcgggggtagcccgtgtatgaactaaccgtcgattgctcacgtttatgtcgtgtgtctttgtcgtggctccgttcataaatcagagatggcatcgagcccgtggacgtcttcctccgcggcgtaaagcaccagtatgcaggatcgcgcgacgcttcgacactcaagtggatcttcaacagattcccgacgcttgtgtggctacatgagccgctgcagtggagcccgagcttctgcatggaggtgatttgcctggtgggcgtcaccgtgtcggtgctgggcgttctacggccggcgtggcgcactgctggaccgctggcgctgctgtggttctgctacttgtccatcgtgcagtgcggccagaccttcatgcaatttcaatgggactcgtttctgctggaggtcggcgttctggcggtgctgctagccccgtggtggcagccgcacaacaagacggacaatatgttcgaaacaccggcggctgcggtttggacgctgcgcttcctgttcttcaagttcatgatcatgtccggcgctgtcaagatccagtctcgctgccctacatggcttgggctcactgcgctggacttccatttcgcgtcacagcctctacctctacctctcgcttggtatgcactgcaggctccggtaagtttatcattagcagagtaaccattttttgatggggtcgtggtatctgacgaccttttgtacgttaatgtagccgattatcaaccgccttgctgtagcagtaacactgctgattgaaggcccctggacattcttcttgctcgcgcctcataccgcgttgcggagggtcggtgccattcagcaaatcgcgctgcagatttccattatcctgacggggaattacaacttcttcaatctcttgaccatggttctggcgggggctctacttgacatcgacagccacaccgccaaggacaaatatcgctacgcaaagtcaacgacaaccacgcacaagtcatggattactcgagtggagtgggcatggtacacatttcagacgcacccggccgtcacgaaagcagctttattgggcagtctcggattttgcgtctacacatggctggaggtcttcgcaatgacgactcaggatgatccgttcaaggagcagcatggcttcatggagctactgctagctacaaggatccgattgctaccatctgtggaggatacccagacatggctagcgctgattttgccgcgttgtgtgctgctcgccgctaccctcgtcgtatgctcaagctgctggcaacttgttcgctccacatcccgacgggaccgcagctttaatggctccaggaaaaggcttgctctgcgatccatgtacttgctgacgacgacgatggcaagcttatgggtcttcacgagcagtgcggccactctggcggtgttggatcagtcctaccagcactcactgccgtcttttgctgtctcggtgtaccgctcgacggaaaagtaccgcatcaccagcgcctacgggctatttcgcaccatgacgggcgtgggcacggttcaactcgagaatggacaacgtttctcggtggttgctcgaccggagatcatattggaaggcacgaaagacggcgggctgacatgggaagaatatcacttcaagtacaagccgtgcgacgtgaatgccgcgccgcgcttggtagctcctttccacccgcgactggattggcagatgtggttcgccgcactgggcgactaccaaagcgcaccgtggcttgtgcatctcgtgaccaaactcttggaaggctccccaggcgtgaaggagctgctcgactcgactcgcgacccgtttccggacgccccaccggacgccattcgagcgcagctctactactacgacttcacgcgcctgaacacgtcgtggaaccaagctctcccgacgtccaggatcctggacaacagcagcgacccacagtggtggacgaggacctatgtgagggagtacttgccagcgctggagcgtgggaacccgtcgctcgcagcgtttgtgcagcagcactggccgcaggagcccaccccagttcccaagctttcgccgacggtctcagctacgcgtcagtggatcgaccaggtgctgcagtggctgtgcagatccccgtggtcgcccgtgggtctcgcggccggcatcatgattgccctgtccggtgttgcaacactgttccgctgcagcagtgaaacagccaagttgaagctcgattaatgcgccgcggtgattggacgagatctggatcgcaattgtaaccaatggagacgggatcgggcgatgattgggggatattacggcggacctcggggagggatgacccacccgacaccgcggccagtgccacctgttcccccgaccgcaatggggctccgtcaggcgccaagggcccgcaagcatggtcgtcgatgagtcagcgcggggctcgtttatcgcacttggcctagtcgatctgccgcccgcgagttacccgctgcatcgggacgccggcagcgatcttcattcaggctctcttgcccccagtatggtcgctccgggtcaaagaaacggcaccgacggggagcggaagatgtcgcccttcctggcgcggcccttggaccccgaggtttttatgcggaaaaacctcgagcgccctgcgaccaatctctcggcggacgcgtgggcgctcggccgccggcgctcttcgcgtgtcatttctgcggaagaaacggagacaagaggtgagcgagcgagcgtggcgagatgatggggatgtgggggcggcagctgtagaccaggacgccctgcgttggcggatgctgtggatcggttgctgctgccgcctctggtgctggactgagctatgttggacgaggcgactgacgcgacggcgtatctttttcctttttgttgtgttccgtttggatcccgcagtgaagaatggaggctgctgaccagcgcaagtgccacaactgcggccagaccggccacctgcgtcgcgactgccccgaggccccgtcccaggagggattcagcggctacggcggcccgtgcttcggctgcggcaaggtcggccacctgaagcgcgactgccccacgagcaccggcggccgcgcctgccacaactgcggccaggtgggccacatccgccgcgactgccccgaggacgtgcagccccccaagtgccacaactgcggtgagaccggccacctgcgccgcgactgcccccaggagctgcgcgagtcgcgcaagtgccaccactgcggccagagcggccacctgcgtcgcgactgccccgatgacaacggcccgagcgaggacaagtgctaccagtgcggcgagaccggccactgggcccgcaactgccccggcgccaaggcctaagcacccgacgccgtgaaggatccaactgcgagagaggagggagggagcgagcgagaaaggagagggtatagatgtgtcacgacgcgcggaactgcccgctttgtactagtatttccccgatgagatcttcggcctttcgtggtagcgagacacgtagtgaaggtgcgagagagagaaggagcctcctgcgcgcgggacctcgtcgagtctccagccaactggagtcccggcgtggaccgcggcagtgctcggatttcttattaactaaactatcttgtccaacacaaacaccatttgcacgtgtcttccactgatccacgagtcccccacgaagggcttcaagctgacccgcgatctttctgcagcagattattgagcttgttgatgtcggcgggattgtgatctcaacgtgactacggggatcggtgtgaatgaccatgaagttcccgaaaaacctgttgcctctgcacattgcagaacttctgcgatgtcagaagtgagcagggggcagcgctgtttgtccttgcattgccggccgcgagtgagctaactgagtagctggactgctgtcgtctagctacttgttgatcatttcttttttttcaagttgtagttcgagttgccagcaatactcgcctcggaacatatcaatgcgcgttttcagagcttggcggtactcgagagactcgctcaccctcttcgctgcatgtaagattccagccatgcagaacaccgctacaaccagcgcaacaacagagataccgacgaagctacatgtagcccagcccagtgtagccaccggggcattcccatccggcacagtagtttgcggccatgaacggagccaaaagaccctatcaagcaagctgatgaacgcgggtatataaccaaatacatctcgagaccctcgagcgtgcgtgctgtgctgcctctcctgcttcctgtttcttgcttactgttttcttctcgtttcctctcctccttcgcgtaattcatgtctccccagagcgccaagaacagtaggtcacttgatgcggtcgcgagcgaggacgctccagactctggcgctcgtccttggtattaatattaatactggtcgagaacctgagtctgcaggcgtttgtccaggtctcgcggcgcttcctgagccctgtcgaggccgctcttcactcgtcaccggtggcgcagttctgttattgcttcgcattaaacgccgccgccctcgccgccagtttccggtcacgctcgtccatcatacggtcccagtccgtcagcagctccagcttgctctgaacgtcgcaaaagaaataataaaaaaatgttagaatcacgcgggggacaaaagcgcgccgcggtgaagagcgcacctgcatgttgttgcgggcctgccacttgttgacggcgccgaagcccacgcccatgagcgagaaggcgacggagatgaccacgaggccgggcagcacttggtacggcatcttagtctccgctttcccgaggcaatgagcggccctccaccgccgaaatcttcgcgcaacattcagcaacattcagctcttggaacgacattggagcaaccatcaacgatttgcctaccttcttgcgccacttcaacttgttgttgccttcaaggagcatatatttcctacggctatgaatcctggcagggtaggagccacgcttgcggccactaatagcactcattaacttgtgaactgggcgcgtggggtcatctgcagcggcagaccaccgtccatgaagagcgccattttcagcacgtagcctcgctcctgcttctcgccaggtgcaatggcaacatgaaaccggctgagcgtggtggcgaggaagaacttggtctccagtatggccatattcatccccgggcaaatgcgtggccccgcttggaagaccggaaactcgtacgcgctcgggcgcttggacatctccagccagcgttcagggcggaactccagcggattgtcaccccacagcgcgctgttgcgacccatgtaccacggacagtagacgacgtcgacacctgcaggcacgaaggtgccgtcgggcaggtaatcgtccttcacggcgctcttgacgttgtacggcactgctgggtacagccgcaacgcctcgtacacgacggcgtcgagatatttcatgctgttcacttcgtcaaacgtgaaagctgtcaccttcaatccgccactagttttgatcgactcgagctcctccacaattcgttgttggacttgcggatgcttcgcgatcgcgtagaagctgtaagtgatgcactccgctatggtgtctcggccaccaaagacgaacgtcaagatgatggagcgaagcgtgttgggccccagcaacgcagcggcgtccgcaccttgctccttggtgccttcagcagctagctctcgagccttgcggatgaacaacgacagtagatccgaccgcgcgctgattttctccccaggttctttcagacgtcgaagcaaaatattgtcagcgaccgctcgaataccacgcgtgcatcgtcgtagctcgcgctcactgggcatgacccacgacaacatcttgtagtactgcttgacaaagagcctctgtgcgcagtgctcattgacaaagttgatttgctctgcgaactcgtcagctccctcgatctcgctcagaggcaggccgaaggcgacgtcgaagatggagttgaacgtgtatctcgcactaacagcctgcatatcgcagcaaaagctctcgttgctactttggctgtctctcaccttgaccgcctcggcttgtgcattcaccatcgtttcttcggcgtgtctggcaaagattttctccgtatagatgcggaagttggctgtcgtgaacactttaagcgtcactttgcgttgcagacgccaaccagctccgccgtccggtgcctcggcgttgtggttcaaaatgaagagcgagttgtcgaaggcctcttgaaaggcgtccagaaatccctgcggcttcacgtagttgttgaaattcgtcgacaggatgtgctggacgtcctttgggtctgtgatctgtacattcaagacgacaacactgatgaatgagtatatctctgcatcatttaccttaccaccagcaacaatcttcttacgtagatggctccatcgaagaaaagatgccacggcatcttcatgcgcccgccgtactgcttcagcagatcctcctggttgacgagggggaagataaatgacatgtcagccttcagtgtttggatcaagtgaaggcgagcgctcaattcctcaccaagaactcgtagatgcggttgtggttcttgatgaacgctggcatgttacccagtagccacactccgggagaaccgctcagaggctccagcccgcgagcgatacgcactttgcggtgaaacatcgtgccgatcttggccagcagactcgcgacggcggcggtgagcaggatcttcgccacggcactagctgcgggaggctcgagcgagctccatgggctcaaaggaaggggcggtaactgcatgttgccggcgctcaccgctcgaaggtttcaggagaagatcggaagtggagggttggagttctcgcaacggtctcgtatccgggttgtgaaataagttgacccgcgagtctcttagtctgtggatgcaggatcaacatggtaatgtggcgcacgcttcatggttgatcaagcaagttacggctcacctttggtgaacgtactcatccgattcgaggggattttaccagcagccccgatctaagcagaaaatgaccgcgttggtgacgctgctcgacagctcagcaacgttgtgccgtcgcgcctccctgtccgaattttgcgagcaaatgttcgcgcgtggggtgtgggtcctgcctccgtcagcgcgttggtatatggtatgaactctgccacgcggaagtttatcaaggacgtcatcgtgcacgacacccagatcctggagctcattaccggcttcatgggatcaaaagtgtgactttcagaagctggagatggtcatggaaactgtcttcagacgtgtcatttgccccagcgctggagaataccttgctgacggcacttgcagtttctgagctggagaataaatctccgtaagttgcgcaggcagcgccagtgtctccaattgcgtcagctccctcagtctcgagacgtttcttagccttgcaccactctgatccagccttgtcatggaggtcggccacggtctcgcaaggtccacgacaggtttctcggcttcatctcattcgtgttcaataaagcatggcgtataccgactcgaacggatgtaagatagatttcatccgcaaaacttatgaccttggcgagctcgttgttcgtattgaccaagataccgatgacaagcctgcgctagaccttggaccgtgtagtggatgctcagctcaagaacttgtatacccttgatatcgcggcaatcagacacggactcacagttctaggttttcccagaatactacatgtagtggtttacagcgtagctttgaaagttgtgcgcttgacctgcgtagacctggagatgaaatctcacgtccttcaccaggctgcgctcgttgttggaggcattggaggagctaacgatctctcaacgcgggaacctgaagtggtttagcattatatctccaggcaatgaagcaatacacgggaatatgaagcgcttgaagtctcgagatgcagaaatcgacgacatcgagtttttgcgaatctcaaagagctgccaattgaccaattctctgctacgatggattggagtccctagaattgctcccactacgtactgaaggtgctagatcaaggcaaagagatcaatttcgacgaggattgcgcttcacagtgagaaacctcggcgaagcttccaagcttgacaacacttaagcgtccaccttatattgcatgcgcttccccgctccagcacctgaaaaccctggaggctttcagtcgatccgggaaatccctggacccagcgctctggacaaacccggagaccgtacaatggaccggctgatgctcttcagacctcctccgtacccgttcccgaggacattgctgcacctcgagcttcggcttggagacgaagacgtggagtacgcgtacatcgcggcaatgacccaactccggacgttgtgcatctacgactcgagcaatttaatccccgttctgaagaagtcgctggccaccgacgtcgctccgctgctgtcactcacagaactggggtacgtcgatctgcgtgacactagagcggccaacgccgacctgcgcctgtaagacacccacttcaacttgaagtcgggttctgccaagtcaatccaaatcgcaattaagcgagaacaacggtgcaatcattgacaatcactcgcatactttaaccccctcaagcatcctccggtacgtgtgacacgccacattacggggttgcatcgtcgtcactttatcagaagctcggcgtaagcaagaagcgtgtcattccccacctcgccgtgcacgccccagagcctctataccctccccatagtgcctgtcatcttccccctcgcctcctgtctccaaccacgtgcttatttccctctaactccccgtacaagcgccgataatgtcctcgaacccgagcgcccgcctgaacggcatcttccaggacgcctcggcctctggcggcggcaacgacgcgctgcgctacacggcgccccgggagccctcgcacaagcagcagcaacagcagcaggcggcggcggcccctgcggcctccgcgcccgcctcctccgtcgtgttctccaccatggtctctctgtatcaatacgacgcctcggcccgcaagtacgtgcagctcgggggcgccacagcaggcagcaaggtcgccgtgggctgcgtcatcgtgggcgccgagacgtcctacaacctgctcttctacaacgccgccaagcagcatttgtgtgctgtgcccgtcaagttcgggacctttaaacccacgctgcaggccaagagttacgtcaacttttacgacgaacaaggagttaattggtcggttaaattccccagcgacgcgcaggtggccgagttcatgcgccaagtgtttctggccaagatccacgtggagatctggggcagcgagaagaccgtgaccaagaccaacccgagcgcgctgatccaggacgacctggtgtttgtcaagcccgagacgccgcaggtgaacaacggcgacacagtggcggtcgcgtttagcgcctggagagttgtgggcaacgccaactcggcgcccgcggatgtcgtgaccaagtacgcgcccttcgagaaggcaggcgagggtgatctgcgcaagatccgacttggagacagcagtgagcgcatcaaggcgctggaggagggcattgtgggcatgaggaagggcggaaagcgcattgtgctggctcctcctggaaagaccaacggacaggattggtacctgctggagatcgagctgctgaagaccaagactggacacggcgcgacgcagcggaagtcggtgccggctgtgaacacatcggcggcaatagaggaagcacccaaggcttcgtcggagaagaaggcgtcgcgacggcgttcgacccctacatcggcaagctcgaatgctacggcggcagcaccgtcgcgttccaacagcacgcgcaacctcaatgatagaaatgatgctgctaggaacggagacctcgtgccgtacgaagaagagttgaacagcgccgcggcgaagaacgaaatggagctcaaggagctgcgcttgctgcagcgtgaacagcagctggagctccaggcgcgtgctcttgagcgcgagcggatgagtgttactggaggtggtggtggctttggatccatgggctttggtctgggaggcggattcaacagcagcttccccagctcgtcggcgctgttcaacaacagcgcgcttagtggaggtcgccctgttgacgcaatgctgtcggagctgaacgccaaggtggactatttgattcgcatgacaccgggaacgtcatccagttctgggtctggagttggtgctggcccgagtgacgttgctgcggtgatccgcggtgtggagaggcttgctagcgagaacgacaggcttttgacgcagattaactcgcagcatcagcagcagtcgtcgtacgagaagcgttgcgaggagctcttggaacagaatcagcgactgcaagacgagaagcgcacgctgcaggagcggtaccagtcggccgccagctctcagctgaatgttacgtctgagttgagtgcgctcgccagcgcacgcgatgcggcagtcacgcagacgaaccgtttgcacgcggagtatcagcaactcctgacagcgtactaccagttgcagcaacaacaaggcgcaagcaatgaggctgaggagcacaagcaggcgctcaattttgaacgtgaagcccgtgctcgcactgaaaagcaacttgccaaggaaacccaggctcgctctctggcggagcaggagctggcgctcacgaagaagcagcacgatgtggctctgcaagtcaagacctcggagctgtctacagcgacagctcaattggagcagcaggtgcgctcacttcaaacgcagctccagaaggtcaatgatgatagagtgcgactacaagcccacgcggaagagcacgcgcagcgactagcagctctaagtgagagcaaggagcgggatgcgaagcagcagctggagagggctgcacagcaagttgctcagttgcagcaggaaaaccaggacttgactggcaagctggacgtgtcctcggcatgcgttcacgagctagaagcggagctggagttgaaggcagcgatcccggagacgaacgctgaggcgggtagtgcattggctgctgaagagaaacggatttttgtcgagcagatcgagctgctgcagcaacagatcaaagatctggagcaggagaagtttgagcaagtgcagcaggcgctggcgtctggccgtctatcgtcgcccggtgctagtccgcgggggcagaaggcgggcttcggaggtgagtgtgagaactgcgcggcggtcaaggaccgcgagcaggcagcggagcgtgctctggccgccgcagaggctatcaagcgggaagcgcaggacatgctggccgttgcagcacacactggaggaggcacggatgagcgcgagaggctcgtggccctgttcaaggagtccgtgaacgaaatgttcttccgcttccaggacttgttcgaggaggagaccgccgtggatggcaagcaggtgctcacggccattcggaaggtcctcaagtccagtacgaagagtatcattcagcagctgcaggagcccgcgccgcagcaggacactgagactgaagccgagagcgacggaaacgtgagtgatggaccccctgcacccccaccgcaagagaccccggtcgttcaagctgccgcagcggtggcggcggttgccgagactgttgctgctgttgaagcagcggtagctcctgtggagggcgagctgcatgacggccgtaattctgaagagaagtccacgcccgttgaggaggttgctgcccctgccgacgaagaggagaagctgaatgcatccgccgcggaggcaaaggtggaggtagagacagaagccgcctctcccagtgccacaccagtgaaagcagcgcaagctccagcttcggtcgtcaccgcccccgtcctccatgtagcccagtatccgtccagtgacgagagtgacagcgattccgacttccaagagtagacgcaagcaaggcgcacgggggcagcaggacgatcgaaggcttgtcgccaccaccaaataaaccactcgcagccttcctgcacacatgtcacgagaacatttttgctgttggacggatgcaactaacgcgtttaagaaaaatatgaacttccatttgaacaaacgctgcccagcactctccaaacaatgcacacgcccagcacatggacgcgaggtgaagtgctgagcgaattgccaatcacccattattgtgattggccgtcaaagttcattttccactttcacaagcgcgacgatgcctgctggaagctccaccaccaagaagacgcccgtgcgcatgggcaaggtcttctcgcagatgctgacggactgtccacttgatgtacgtacagtgtctattacatgcaattgtcgtgtctgcattggccatccatccatctatcaagatacactatctctcttccttgcgtcattgttctaacgtaattttgatgccgccagatccaagtgtacggcaagtgcgtggccaacatccacgggggcgtgagtcgccaggcgtgcgagaaggagttccagaagctgcgcgcctgcttcgagcgtgtggcgcacaagcgccgcgcatagagacaagagagacaagttgtcctccgcgcagcaacagcctctcagctcagttcgctcattttggccaaatttcagctctagttttcgtcaaacttcactttgtcgcccaatcaaatcgtgtcgctccgctgtgctcgggccgagctttgcgtcattcaggaattttgcgcgcactacacgcggggcgatggaggcggcggcggaggtggcgctctgcgccttccaggcggatccagagcctcgcgataggcgcgttgaatccgccgaggactcttctatcagcagtgcaagtggcagcgacggagacgcagcggagcgcgaggaattcgacgatagcgacgacaacttcggcgccgacgccttgccccgggatcgcgagagtctggagcacgagctagcgcgtctggacgacatggagtgccgtctacaggccgagacagcgacggacttggtgctgggctgcaagctgctgcgggctgcgcgccggcagcgcgtggccagggcccacgcggctctggagcggcggcagtcggcggcgcgccgagtgctcgagtacgccggagagaaggcgcgcgagacgtacgcgagccgctgcgccgagctcaagagggagatgaacgccgacatcgagcgcgagctgcgccggctgcagacggccaaggacggcgtgagcgtgaccagtcgccggcgccgagccgtgagggacgagacgccgccgtccaagagctcgggcaacggcatgaggaggcggcgcacgatgtacaccagcgacggagacgaggatggacctgaagacgtcttcttggcctcggcctcgccccaggagagggcgcacagggtgcagttccaggagaagaagcggctcgagcggctcttggggcgcgcgtcggtcttcaagcccgtcgtgaagcaggtgacgccccaagagatcgcagaggacctggaagccattcgaagcgccgtcccgtgtgatacagagcagttggagacgcctgtgagcaaacctggtaagaaacacaagaccaaaacgacacagcgtcagccgaagaagaagaaacagcagaagaagacggagaagaagaaggaggagaaaccgaagcggcggagaccaacgatcattactcccaggaggataccacacgcattgggaccgaacttacctgcgtctttagcagcagctcaggcgatagcgaaggcagcagcgaagaaccgacggcccagactgcactacaacccgcgcatgctgcaggagggacaggaagtcgaggtgtacaagcggcagcggacagacgcggcgactggcgacgaagacggaagccaggacgagtgcgtcatgtccggcattatcactgcagcgacggcgacgcaggtgtacgtgctcacagccaccggtcgcttcgagtccttcgacgtccgcgactgcgtggccggctcgctctatgtgcaggcagcagaaggcaacggcagcccgacacatagcgtcagacaccccagtagcaatagataatcaaacaaatgaacgctacatgtagctacccccacctgtacggcgacaacagcggcaaatcagctacacagcatcatacgttgagacgtctagtctattggcgcagggcacttgctcgacttctctgtaatggtctgtcttgctattgggctttggctcttactcaggacggcggatgacctcttggccacccatgtacggcctgagcacctcggggatcacgatggagccgtcttcctgctggtaggtttcccacaggctgataagcagacgcgggacagcacaagcagtgccgttgagtgtatgcacgaaggaagttccagcctcctcgtccttcgggtccttgtggcggatgttgaggcggcgagcctggtagtcagtgcacatggacatgcttgagacctcgccgtactcctcgcgtccaggcatccaggccagcaggtcaaatttgcggtaggccggagcgccgaggtcgccagtggccatgtccatgagctcgtagtgcagccccagctcggcgtacatgctcgtctggatctctaccatctcgtcgaagaactcctgcgcctgcgtctcgttggcgcagaaggcgaacatctcgaccttgctgaactggtgaatgcggtagatgccgcgcgtcaggcggccgccatgcccgatctcggtgcggaagcagtggctgaagccagcgtacttgagcggcagcgtgggcgtcggcaggatctcgttgctcttcatagcagccaacgtgatctccgacgtggcggtcagacacaggtccgagttggcgatcgagtagatctgcgtggcctctccacgcggctggaagccgcacccctccacgagcttgtagtgcgccacgtcgggcgggaacatgaccttgaatccgcgcgcgcgcagcttgctcagcgtccagtgcaccagcgcgatctccatcatggcgccttcgttgcacaggtacgtgaacttggagcccgcgactctggcggccgtctgggtgtccagcagctccaactccgtggccaagtcgtagtggtccttgggcttgaagccgaactcgggcttctctccatgcgtgagcaccacgcgcgagtcctcctcggcgcccacgggcacgtccgggtgcgtgtcattgggtatcttcagggcttcgagctccagctgcgtcgacacctgcgccagctcgccctccagctccgcgatctcgcgcttgagctcctggccgcggacgcgcagcgcctcaaaggcctcctgggcctccgcgccctgcttcttcctggccgcagccgcctggccgagctgcttggcgtgcgcgttgcgctccgcgcgcaggaggttggcgctgtggcgcagcttggcctggcgctggtacaggtcggccacgagctgcgggtcgccctcgctgaagcgcttgcggccgttctcgacggcggcgtccacgttctccaccagcttcttgtagtccaggcgagccttgacgtggccgtgcaggttcgacgagacctcggcgtcgtccgggcgcagcgcggcggtggtggcgatggagccggaggcggacgaggagaagaacgagacgggagccgcgcgcctcgccgccatcgacgcacgcgagcggcacgcgcgcatcaacgcgcagcgggtcggcagcatctttgctggtcggtgataggtacgtgaatcgcgagcggctcagaattgccaaaaggtccacgaccagtttttagcgcaattttcaccattatatctcggagtccgatttatataaaatggagctcctacatgatcggtaagtcaaatttagctatatctgacctgagttaggggcatatggctgagaggggaaccattccaagttgaccatacctccccacctctcatgacgcatcagaacaagaagacattggagacaatactacactgtatatagccactacatggcactgaatccgtgtgtgatcatctcgatttgagagggcgccagacttgttttgacggcggtcccttttgccaccgaaagcggtatttctgcccctatttcgcaactcggagcccccagccgcaaaatcgggtaataatatcattatgtagcaaactattaataaatagaacccccataatgcagcctaaataacgttagtgttgctattagttcattgattcgatgacctgtaaggcttactgggctttgcttctctgaccttaactacaaaacatcaccgtgatgattgatggatttcttggatctacttagcgggctgcagtagatgctccactgcaggctgtcgacccctacgcaactcaaaggagcaacgcgactaaaatgctccactactagtttatgcaaaatactgcgatcggtgaacagtaccggcgcttcggtcacccttacgcgctcaggttaatgccgctaatattggccacaaactgcctctgctggtgatgaactcctcatcaccagcagatcaatcatcgccctggtattaccgccaccgccgtgtcgaccggtgtccacgccgagacagaggtggcccagaccttgggtttgctcggactccccggcgtcggctatggcgcacccggctacggatacggcgccggccccgcgctcagtgtcggtgtgcctggcctcgcgagtgtcggcgtcggtgtgggcaacggcggtgttggtgtcggtgccaacgtgctgggcctcggagcgcacgttggtgtgggcttgcccggtgtcggctatcctgcgggctatcctgtgaacggccccgcctacaacaacgcccccccccgcctattgtcaatagcgcccccgcctacaacaacgctccggttactattgtgaatggcgcccctgctacgacggctacgactactggccccaatggtgcgtccactgcgaacgcgaacgccaatgcgaatgcgaacggcggcaacaacccctactcgaccaagacggtctccgtcacgaacggagacggcacgtcgaacacggcgtccgtgtcgaacggaaatggtgccgccgcgacgggtggtgcatcagcgagtgctacggccagcgccagtgcgagtgcgtctgctcgggtcacggctggagtgggggccacgtcgtctcagaagacgtactgccagcttcgctcggtggaatgagcgaggcaagtgtaccctcttaggggagctcgtcgaggtgccgtgagcacctcttggtgaacgaacgggctttgtgtcgcgtgcgcggtttcgagtcgtcttgctgtgattttctcctcgtagcgtatgatggatgttgttcttttggtcgtttgagtaaggagtttcaatgcaatgcaatgcaatgaattcgaaggtttgtgtgagactttgcgcattcgagtgcgtgttgtaacagcacagttgttggcctgtggttttgtatatacgcacccggcagcaggcagagaaacagaaaaaagcaaacacctctggacagtatgcttctcgttgcgctcgcttgtcgctagtgttagatcataccaaagtcaaggcagcaattcgatccgatactttgggatttcctggtctccgattggttgagtgcaacttcaacaaagaacatacaaatactagtatgaagcagatcattcaaaatcaaagtagaatcgccaaggccgggccaacacgagccgagccgagccgagcagagtacagccgagcagagtaaagcagagcagagccaagtagcctttgaggttgcagtatgtagtagcatcaaccgtgtacgcaggttatcatcgttcagcgtgccgcgccttcgccacgtctcgtccacatcaagaagcttgccaaggcctcgacactacagttccatcaccattggtgattcaccaagctgagccgtggaatgcgaataagaacgggtagagagtaggaaccgacaaaaggtccccgccatacagaaattcgggcaaaacatacagaggtgcgcatccaaaacatacatacaaaaactgcacaaacgccacatgtttggattagcacacggcgtcgatcttgccaagaagccgcattcgcaatcttgccaagcagcagaattctcgtaactccgccgtggggcagaattactttttcacgcttgtactgcatagcaaggcaaagtccgtgtcgaactatgcactgaaaatttaacggcggtgattaaggcagtgtaacaaggctcaatgcttgctcacaaagtttgtatacgcagtacactggcatttgtagtccgtcaatcgaaaagccgattgatggaatttgaaatcctggattctccagaagagcctgattgatgtattagcttaatcactcaatcggaagacattcgatctacgtctgtagatttcacttctgaatttcgacacagggacgcgtatcaccagctccatgactcgctaccctcgttacggtttcccgggctcgactgatacgtgttgcagaaggacgatgggacttccacgagggggcagcgggtatactgggcgaagaaagcaaccagctcctactgcgatcttaacaagcatgtcgtgtcaattcaagtgcgtcggagcggcagatgcaacttatctctgccgcgactcgagggtgaacggcagcagtatgattcctcgtatgtacgaaatcggccgagcgcaattgcgagaaacacggtccacggttgcgacgatccgtccactaccgctgctgcatgtgaggtggcttcttttagtgatcatgcgactggcgaaactgcaagtgctgcattccatgtacctgataaaagtgctgctgtgcagaagggcctggcctgcgtgaaaactacatggaaagtttttgctatcatcgacaggactgcagtcggtcgaggttttcgataccgcgttaagtggtgtgacgaactggatggtcatcggtgggaagacacttgggagcctggtttcatgttacgcaaggatggttttagcgatggttgcagtattgtagacgcatggaaagcttccgacgaggcagacttctaccgcttctgcagcaagaatgggcatgtccatttagtgggagcctcgcctggggatccnnnnnnnnnnnnnnnnnnnnnnnnnnnnnnnnnnnnnnnnnnnnnnnnnnnnnnnnnnnnnnnnnnnnnnnnnnnnnnnnnnnnnnnnnnnnnnnnnnnnnnnnnnnnnnnnnnnnnnnnnnnnnnnnnnnnnnnnnnnnnnnnnnnnnnnnnnnnnnnnnnnnnnnnnnnnnnnnnnnnnnnnnnnnnnnnnnnnnnnnnnnnnnnnnnnnnnnnnnnnnnnnnnnnnnnnnnnnnnnnnnnnnnnnnnnnnnnnnnnnnnnnnnnnnnnnnnnnnnnnnnnnnnnnnnnnnnnnnnnnnnnnnnnnnnnnnnnnnnnnnnnnnnnnnnnnnnnnnnnnnnnnnnnnnnnnnnnnnnnnnnnnnnnnnnnnnnnnnnnnnnnnnnnnnnnnnnnnnnnnnnnnnnnnnnnnnnnnnnnnnnnnnnnnnnnnnnnnnnnnnnnnnnnnnnnnnnnnnnnnnnnnnnnnnnnnnnnnnnnnnnnnnnnnnnnnnnnnnnnnnnnnnnnnnnnnnnnnnnnnnnnnnnnnnnnnnnnnnnnnnnnnnnnnnnnnnnnnnnnnnnnnnnnnnnnnnnnnnnnnnnnnnnnnnnnnnnnnnnnnnnnnnnnnnnnnnnnnnnnnnnnnnnnnnnnnnnnnnnnnnnnnnnnnnnnnnnnnnnnnnnnnnnnnnnnnnnnnnnnnnnnnnnnnnnnnnnnnnnnnnnnnnnnnnnnnnnnnnnnnnnnnnnnnnnnnnnnnnnnnnnnnnnnnnnnnnnnnnnnnnnnnnnnnnnnnnnnnnnnnnnnnnnnnnnnnnnnnnnnnnnnnnnnnnnnnnnnnnnnnnnnnnnnnnnnnnnnnnnnnnnnnnnnnnnnnnnnnnnnnnnnnnnnnnnnnnnnnnnnnnnnnnnnnnnnnnnnnnnnnnnnnnnnnnnnnnnnnnnnnnnnnnnnnnnnnnnnnnnnnnnnnnnnnnnnnnnnnnnnnnnnnnnnnnnnnnnnnnnnnnnnnnnnnnnnnnnnnnnnnnnnnnnnnnnnnnnnnnnnnnnnnnnnnnnnnnnnnnnnnnnnnnnnnnnnnnnnnnnnnnnnnnnnnnnnnnnnnnnnnnnnnnnnnnnnnnnnnnnnnnnnnnnnnnnnnnnnnnnnnnnnnnnnnnnnnnnnnnnnnnnnnnnnnnnnnnnnnnnnnnnnnnnnnnnnnnnnnnnnnnnnnnnnnnnnnnnnnnnnnnnnnnnnnnnnnnnnnnnnnnnnnnnnnnnnnnnnnnnnnnnnnnnnnnnnnnnnnnnnnnnnnnnnnnnnnnnnnnnnnnnnnnnnnnnnnnnnnnnnnnnnnnnnnnnnnnnnnnnnnnnnnnnnnnnnnnnnnnnnnnnnnnnnnnnnnnnnnnnnnnnnnnnnnnnnnnnnnnnnnnnnnnnnnnnnnnnnnnnnnnnnnnnnnnnnnnnnnnnnnnnnnnnnnnnnnnnnnnnnnnnnnnnnnnnnnnnnnnnnnnnnnnnnnnnnnnnnnnnnnnnnnnnnnnnnnnnnnnnnnnnnnnnnnnnnnnnnnnnnnnnnnnnnnnnnnnnnnnnnnnnnnnnnnnnnnnnnnnnnnnnnnnnnnnnnnnnnnnnnnnnnnnnnnnnnnnnnnnnnnnnnnnnnnnnnnnnnnnnnnnnnnnnnnnnnnnnnnnnnnnnnnnnnnnnnnnnnnnnnnnnnnnnnnnnnnnnnnnnnnnnnnnnnnnnnnnnnnnnnnnnnnnnnnnnnnnnnnnnnnnnnnnnnnnnnnnnnnnnnnnnnnnnnnnnnnnnnnnnnnnnnnnnnnnnnnnnnnnnnnnnnnnnnnnnnnnnnnnnnnnnnnnnnnnnnnnnnnnnnnnnnnnnnnnnnnnnnnnnnnnnnnnnnnnnnnnnnnnnnnnnnnnnnnnnnnnnnnnnnnnnnnnnnnnnnnnnnnnnnnnnnnnnnnnnnnnnnnnnnnnnnnnnnnnnnnnnnnnnnnnnnnnnnnnnnnnnnnnnnnnnnnnnnnnnnnnnnnnnnnnnnnnnnnnnnnnnnnnnnnnnnnnnnnnnnnnnnnnnnnnnnnnnnnnnnnnnnnnnnnnnnnnnnnnnnnnnnnnnnnnnnnnnnnnnnnnnnnnnnnnnnnnnnnnnnnnnnnnnnnnnnnnnnnnnnnnnnnnnnnnnnnnnnnnnnnnnnnnnnnnnnnnnnnnnnnnnnnnnnnnnnnnnnnnnnnnnnnnnnnnnnnnnnnnnnnnnnnnnnnnnnnnnnnnnnnnnnnnnnnnnnnnnnnnnnnnnnnnnnnnnnnnnnnnnnnnnnnnnnnnnnnnnnnnnnnnnnnnnnnnnnnnnnnnnnnnnnnnnnnnnnnnnnnnnnnnnnnnnnnnnnnnnnnnnnnnnnnnnnnnnnnnnnnnnnnnnnnnnnnnnnnnnnnnnnnnnnnnnnnnnnnnnnnnnnnnnnnnnnnnnnnnnnnnnnnnnnnnnnnnnnnnnnnnnnnnnnnnnnnnnnnnnnnnnnnnnnnnnnnnnnnnnnnnnnnnnnnnnnnnnnnnnnnnnnnnnnnnnnnnnnnnnnnnnnnnnnnnnnnnnnnnnnnnnnnnnnnnnnnnnnnnnnnnnnnnnnnnnnnnnnnnnnnnnnnnnnnnnnnncaacttcttccgatcatcaagcggcaggtgctgtgtacgtttccgtacattgtacaggacatgaaaaaaacacatcaacttcgtggcgtgctggaaggttggtacattttgtagtgcgagaaactgagaatcctccgcatcgctcattgtaaaatcacagcgaatagaaatccctcgaagactgcgcactaactccacaaaagccctgaagcactccgtgtactcatgctcggcgcggcgactcaccacgaagaaagctccgacttggtatctcctggcttggtcggtgaacccgcaggttatcacggggtacccaatatcactcagcttaaaggttgcgtcagcatggaacaggacacgagcatcacccgtactgaagcgaatacaactgtcgaatattgctagtgaagtcacgccgacaataaacgggtcattgtcatctcccgagccaacgtaagtcatgccatcgacgttcagttttgcaccaaacacaaatgccgtttctggtgggttctcgggtttgtagcagcgcgatcgggccagtctgtgaattgcttggatagagttcttgggcccttgttcttttcggatacgttttagggcgttctgaacctgagaaagtgtaggccaccctccccgcgacggtcggatgttgacctgtttcttcagatggacctcgataacccggggtgacagtccaacctcatcttgggtagcgtagcgataaacgctttcatagggcgagtgacgaggggagtgtgttgttcgctgcacgtgagcactcctctcgcgtggccgttcaagttcacaagtacacgccacttatcttgccccttgcactggaataccttccacacaattccacacttgccaaaccttatacaggttttgcttgagcacttcagtcgacgctctatcatcgtgtgctttccgccacagatgcggcagaaatcgaagtccactttgtgaaaaacggcggtacaacacatgagctggtcacggtagctatcatagtcatccgcgctgtcaagaagagagagctgtatccacgtagacatcctcgcaacaacaagaaagtagaagccagtgagtttgcagtataagcgtttgagttagttgtgtatgcacaaccgatcgctgcggtgtcctagcaatccagtcactcggataagaagccgagtcaattcagccgccccgcaattttgccgtccggctaagaggccggggtaaatccgccggccggccgttatacttcgaaccatcttattatactctagacagggttatatatttcatcccccacaatatggttgctccccagagttgtatattttgcaccacaaatctgtatagttacgcacgctcctcgtaggaaccaacatgaacatcaactgctccggatggggtcatgagtcgtgactgtggccaagggtcgtccttcatgtcaatgacggtcaagcgtctacaccacctgcccttccggatccttgcaaacctacacacctctccctcaaatgtgcacactacgcagtagatatccacgtctaaccaacccgccaacaccagtccgttcgatccagcgcagcatctgtatgacggtcgcgaccctggtgactgcatgcaccggcccacaggatcacatccatcctggtaatcgcgagcccaggcgcagcagggcgaccgaccgacccgacggatggccggcgttggcgtccgtgtcacttggcagccagctgatcgacgcttgctttcttgccagctggccaaagctagccttgcctccggtagcctcgcgactagctggctggccgcctcgcatcagttcattctccaatctactccctcccatcgaagcaacccgctcgatctccgccagagccagcgctctcccaaacgttctatcggaccaagtctctcctactacttctacttactcaacccaaacagccatgttcagcctcagcaccagcagcaagatcttcgctctgtgcattgccggcaccgccgtgtcgaccggtgcccacgccgagacagaggcggaccagaccttgggtttgctcggactccccggcgtcggctatggcgcacccggctacggatacggcgccggccccgcgctcagtgtcggtgtgccccgcctcgcgagtgtcggcgtcggtgtgggcaacggcggtgttggtgtcggtgccaacgtgctgggcctcggagcgcacgtcggtgtgggcttgcccggtgtcggctatcctgcgggctatcctgcgaacggcgtcccgccgaccggtgtctacaacgctccgccgcctattgtcaacggcgcccccgcctacaacaacgctccggctactgttgtgaacagcgcccctgctacgacggctacgactagtggcgccaatggcgcgtctactgcgaacgcgaacgccaatgcgaatgcgaacggcggcaacagcccctactcgaccaagacggtctccgtcacgaacggagacggcacgtcgaacacggcgtccgtgtcgaacggaaatggtgccgccgcgacgggtggtgcatcagcgagtgctacggccagcgccagtgcgagtgcgtctgctcgggtcacggctggagtgggggccacgtcgtctcagaagacgtactgccagcttcgctcggtggaatgagcgaggcaagtgtaccctcttaggggagctcgtcgaggtgccgtgagcacctcttggtgaacgaacgggctttgtgtcgcgcgcgcggtttcgagtcgtcttgctgtgattttctcctcgtagcgtatgatggatgttgtccttttggtcgtttgagtaaggagtttcaatgcaatgcaatgcaatgaattcgaaggtttgtgtgagactttgcgcattcgagtgcgtgttgtaacagcacagttgttggcctgtggttttgtatatacgcacccggcagcaggcagagaaacagaaaaaagcaaacacctctggacagtatgcttctcgttgcgctcgcttgtcgctagtgttagatcataccaaagtcaaggcagcaattcgatccgatactttgggatttcctggtctccgattggttgagtgcaacttcaacaaagaacatacaaatactagtatgaagcagatcattcaaaatcaaagtagaatcgccaaggccgggccaacacgagccgagccgagccgagcagagtacagccgagcagagtaaagcagagcagagccaagtagcctttgaggttgcagtatgtagtagcatcaaccgtgtacgcaggttatcatcgttcagcgtgccgcgccttcgccacgtgtcgtccacatcaagaagcttgccaaggcctcgacactacagttccatcaccattggtgattcaccaagctgagccgtggaatgcgaataagaacgggtagagagtaggaaccgacaaaaggtccccgccatacagaaattcgggcaaaacatacagaggtgcgcatccaaaacatacatacaaaaactgcacaaacgccacatgtttggattagcacacggcgtcgatcttgccaagaagccgcattcgtaatcttgccaagcagcagaattctcgtaactccgccgtggggcagaattactttttcacgcttgtactgcatagcaaggcaaagtccgtgtcgaactatgcactgaaaatttaacggcggtgattaaggcagtgtaacaaggctcaatgcttgctcacaaagtttgtatacgcagtacactggcatttgtagtccgtcaatcgaaaagccgattgatggaatttgaaatcctggattctccagaagagcctgattgatgtattagcttaatcactcaatcggaagacattcgatctacgtctgtagatttcacttctgaatttcgacacagggacgcgtatcgccagctccatgactcgctaccctcgttacggtttcccgggctcgactgatacgtgttgcagaaggacgatgggacttccacgagggggcagcgggtatactgggcgaagaaagcaaccagctcctactgcgatcttaacaagcatgtcgtgtcaattcaagtgcgtcggagcggcagatgcaacttatctctgccgcgactcgagggtgaacggcagcagtatgattcctcgtatgtacgaaatcggccgagcgcaattgcgagaaacacggtccacggttgcgacgatccgtccactaccgctgctgcatgtgaggtggcttcttttagtgatcatgcgactggcgaaactgcaagtgctgcattccatgtacctgataaaagtgctgctgtgcagaagggcctggcctgcgtgaaaactacatggaaagtttttgctatcatcgacaggactgcagtcggtcgaggttttcgataccgcgttaagtggtgtgacgaactggatggtcatcggtgggaagacacttgggagcctggtttcatgttacgcaaggatggttttagcgatggttgcagtattgtagacgcatggaaagcttccgacgaggcagacttctaccgcttctgcagcaagaatgggcatgtccatttagtgggagcctcgcctaaaggtatgtgcgccgttttatgctgtaggtgtcgctgcgaagctactagggatcactggctggaactcgtcaagcgtggctcaagattttatttcctactgcgccaaccggggtcggcctatttctcctagtggattaacctacggtgagcttcgacactacgtgagatttgtgaatgggcgtaataccactggaggacagatcagtatgtccgcactggacaaaaacttactgggtggagtgaatggaaagctggccggccaacgtctgcgtgtaatcgatttaacggaaggtggatacgtttgtgccgcattcaacttgatgggagtaagccattgtatcgccatccacgttgtctgtggtgagaagtacgtctacgatgaggaaaacgattcggtcgctttaggcgcctatgatttggactggatttacgggatctcttttctgcgtagagtggcgttgtacgtcaagtgattgcctttacagcgatgctgtcacaagttcgaacatcgtttttttatagggagttgttgccgtctgcgggcctaactcacacaaggtagcacccctaagtatcaatacgtatttatatacagtgagttccatctcgttttcattcttttttttgattgcagctcacagatcgacaaatatttacagtgtattctattaatacaatgggtttcatagaattttcattcctttgcagcacacaaagcgatcannnnnnnnnnnnnnnnnnnnnnnnnnnnnnnnnnnnnnnnnnnnnnnnnnnnnnnnnnnnnnnnnnnnnnnnnnnnnnnnnnnnnnnnnnnnnnnnnnnnnnnnnnnnnnnnnnnnnnnnnnnnnnnnnnnnnnnnnnnnnnnnnnnnnnnnnnnnnnnnnnnnnnnnnnnnnnnnnnnnnnnnnnnnnnnnnnnnnnnnnnnnnnnnnnnnnnnnnnnnnnnnnnnnnnnnnnnnnnnnnnnnnnnnnnnnnnnnnnnnnnnnnnnnnnnnnnnnnnnnnnnnnnnnnnnnnnnnnnnnnnnnnnnnnnnnnnnnnnnnnnnnnnnnnnnnnnnnnnnnnnnnnnnnnnnnnnnnnnnnnnnnnnnnnnnnnnnnnnnnnnnnnnnnnnnnnnnnnnnnnnnnnnnnnnnnnnnnnnnnnnnnnnnnnnnnnnnnnnnnnnnnnnnnnnnnnnnnnnnnnnnnnnnnnnnnnnnnnnnnnnnnnnnnnnnnnnnnnnnnnnnnnnnnnnnnnnnnnnnnnnnnnnnnnnnnnnnnnnnnnnnnnnnnnnnnnnnnnnnnnnnnnnnnnnnnnnnnnnnnnnnnnnnnnnnnnnnnnnnnnnnnnnnnnnnnnnnnnnnnnnnnnnnnnnnnnnnnnnnnnnnnnnnnnnnnnnnnnnnnnnnnnnnnnnnnnnnnnnnnnnnnnnnnnnnnnnnnnnnnnnnnnnnnnnnnnnnnnnnnnnnnnnnnnnnnnnnnnnnnnnnnnnnnnnnnnnnnnnnnnnnnnnnnnnnnnnnnnnnnnnnnnnnnnnnnnnnnnnnnnnnnnnnnnnnnnnnnnnnnnnnnnnnnnnnnnnnnnnnnnnnnnnnnnnnnnnnnnnnnnnnnnnnnnnnnnnnnnnnnnnnnnnnnnnnnnnnnnnnnnnnnnnnnnnnnnnnnnnnnnnnnnnnnnnnnnnnnnnnnnnnnnnnnnnnnnnnnnnnnnnnnnnnnnnnnnnnnnnnnnnnnnnnnnnnnnnnnnnnnnnnnnnnnnnnnnnnnnnnnnnnnnnnnnnnnnnnnnnnnnnnnnnnnnnnnnnnnnnnnnnnnnnnnnnnnnnnnnnnnnnnnnnnnnnnnnnnnnnnnnnnnnnnnnnnnnnnnnnnnnnnnnnnnnnnnnnnnnnnnnnnnnnnnnnnnnnnnnnnnnnnnnnnnnnnnnnnnnnnnnnnnnnnnnnnnnnnnnnnnnnnnnnnnnnnnnnnnnnnnnnnnnnnnnnnnnnnnnnnnnnnnnnnnnnnnnnnnnnnnnnnnnnnnnnnnnnnnnnnnnnnnnnnnnnnnnnnnnnnnnnnnnnnnnnnnnnnnnnnnnnnnnnnnnnnnnnnnnnnnnnnnnnnnnnnnnnnnnnnnnnnnnnnnnnnnnnnnnnnnnnnnnnnnnnnnnnnnnnnnnnnnnnnnnnnnnnnnnnnnnnnnnnnnnnnnnnnnnnnnnnnnnnnnnnnnnnnnnnnnnnnnnnnnnnnnnnnnnnnnnnnnnnnnnnnnnnnnnnnnnnnnnnnnnnnnnnnnnnnnnnnnnnnnnnnnnnnnnnnnnnnnnnnnnnnnnnnnnnnnnnnnnnnnnnnnnnnnnnnnnnnnnnnnnnnnnnnnnnnnnnnnnnnnnnnnnnnnnnnnnnnnnnnnnnnnnnnnnnnnnnnnnnnnnnnnnnnnnnnnnnnnnnnnnnnnnnnnnnnnnnnnnnnnnnnnnnnnnnnnnnnnnnnnnnnnnnnnnnnnnnnnnnnnnnnnnnnnnnnnnnnnnnnnnnnnnnnnnnnnnnnnnnnnnnnnnnnnnnnnnnnnnnnnnnnnnnnnnnnnnnnnnnnnnnnnnnnnnnnnnnnnnnnnnnnnnnnnnnnnnnnnnnnnnnnnnnnnnnnnnnnnnnnnnnnnnnnnnnnnnnnnnnnnnnnnnnnnnnnnnnnnnnnnnnnnnnnnnnnnnnnnnnnnnnnnnnnnnnnnnnnnnnnnnnnnnnnnnnnnnnnnnnnnnnnnnnnnnnnnnnnnnnnnnnnnnnnnnnnnnnnnnnnnnnnnnnnnnnnnnnnnnnnnnnnnnnnnnnnnnnnnnnnnnnnnnnnnnnnnnnnnnnnnnnnnnnnnnnnnnnnnnnnnnnnnnnnnnnnnnnnnnnnnnnnnnnnnnnnnnnnnnnnnnnnnnnnnnnnnnnnnnnnnnnnnnnnnnnnnnnnnnnnnnnnnnnnnnnnnnnnnnnnnnnnnnnnnnnnnnnnnnnnnnnnnnnnnnnnnnnnnnnnnnnnnnnnnnnnnnnnnnnnnnnnnnnnnnnnnnnnnnnnnnnnnnnnnnnnnnnnnnnnnnnnnnnnnnnnnnnnnnnnnnnnnnnnnnnnnnnnnnnnnnnnnnnnnnnnnnnnnnnnnnnnnnnnnnnnnnnnnnnnnnnnnnnnnnnnnnnnnnnnnnnnnnnnnnnnnnnnnnnnnnnnnnnnnnnnnnnnnnnnnnnnnnnnnnnnnnnnnnnnnnnnnnnnnnnnnnnnnnnnnnnnnnnnnnnnnnnnnnnnnnnnnnnnnnnnnnnnnnnnnnnnnnnnnnnnnnnnnnnnnnnnnnnnnnnnnnnnnnnnnnnnnnnnnnnnnnnnnnnnnnnnnnnnnnnnnnnnnnnnnnnnnnnnnnnnnnnnnnnnnnnnnnnnnnnnnnnnnnnnnnnnnnnnnnnnnnnnnnnnnnnnnnnnnnnnnnnnnnnnnnnnnnnnnnnnnnnnnnnnnnnnnnnnnnnnnnnnnnnnnnnnnnnnnnnnnnnnnnnnnnnnnnnnnnnnnnnnnnnnnnnnnnnnnnnnnnnnnnnnnnnnnnnnnnnnnnnnnnnnnnnnnnnnnnnnnnnnnnnnnnnnnnnnnnnnnnnnnnnnnnnnnnnnnnnnnnnnnnnnnnnnnnnnnnnnnnnnnnnnnnnnnnnnnnnnnnnnnnnnnnnnnnnnnnnnnnnnnnnnnnnnnnnnnnnnnnnnnnnnnnnnnnnnnnnnnnnnnnnnnnnnnnnnnnnnnnnnnnnnnnnnnnnnnnnnnnnnnnnnnnnnnnnnnnnnnnnnnnnnnnnnnnnnnnnnnnnnnnnnnnnnnnnnnnnnnnnnnnnnnnnnnnnnnnnnnnnnnnnnnnnnnnnnnnnnnnnnnnnnnnnnnnnnnnnnnnnnnnnnnnnnnnnnnnnnnnnnnnnnnnnnnnnnnnnnnnnnnnnnnnnnnnnnnnnnnnnnnnnnnnnnnnnnnnnnnnnnnnnnnnnnnnnnnnnnnnnnnnnnnnnnnnnnnnnnnnnnnnnnnnnnnnnnnnnnnnnnnnnnnnnnnnnnnnnnnnnnnnnnnnnnnnnnnnnnnnnnnnnnnnnnnnnnnnnnnnnnnnnnnnnnnnnnnnnnnnnnnnnnnnnnnnnnnnnnnnnnnnnnnnnnnnnnnnnnnnnnnnnnnnnnnnnnnnnnnnnnnnnnnnnnnnnnnnnnnnnnnnnnnnnnnnnnnnnnnnnnnnnnnnnnnnnnnnnnnnnnnnnnnnnnnnnnnnnnnnnnnnnnnnnnnnnnnnnnnnnnnnnnnnnnnnnnnnnnnnnnnnnnnnnnnnnnnnnnnnnnnnnnnnnnnnnnnnnnnnnnnnnnnnnnnnnnnnnnnnnnnnnnnnnnnnnnnnnnnnnnnnnnnnnnnnnnnnnnnnnnnnnnnnnnnnnnnnnnnnnnnnnnnnnnnnnnnnnnnnnnnnnnnnnnnnnnnnnnnnnnnnnnnnnnnnnnnnnnnnnnnnnnnnnnnnnnnnnnnnnnnnnnnnnnnnnnnnnnnnnnnnnnnnnnnnnnnnnnnnnnnnnnnnnnnnnnnnnnnnnnnnnnnnnnnnnnnnnnnnnnnnnnnnnnnnnnnnnnnnnnnnnnnnnnnnnnnnnnnnnnnnnnnnnnnnnnnnnnnnnnnnnnnnnnnnnnnnnnnnnnnnnnnnnnnnnnnnnnnnnnnnnnnnnnnnnnnnnnnnnnnnnnnnnnnnnnnnnnnnnnnnnnnnnnnnnnnnnnnnnnnnnnnnnnnnnnnnnnnnnnnnnnnnnnnnnnnnnnnnnnnnnnnnnnnnnnnnnnnnnnnnnnnnnnnnnnnnnnnnnnnnnnnnnnnnnnnnnnnnnnnnnnnnnnnnnnnnnnnnnnnnnnnnnnnnnnnnnnnnnnnnnnnnnnnnnnnnnnnnnnnnnnnnnnnnnnnnnnnnnnnnnnnnnnnnnnnnnnnnnnnnnnnnnnnnnnnnnnnnnnnnnnnnnnnnnnnnnnnnnnnnnnnnnnnnnnnnnnnnnnnnnnnnnnnnnnnnnnnnnnnnnnnnnnnnnnnnnnnnnnnnnnnnnnnnnnnnnnnnnnnnnnnnnnnnnnnnnnnnnnnnnnnnnnnnnnnnnnnnnnnnnnnnnnnnnnnnnnnnnnnnnnnnnnnnnnnnnnnnnnnnnnnnnnnnnnnnnnnnnnnnnnnnnnnnnnnnnnnnnnnnnnnnnnnnnnnnnnnnnnnnnnnnnnnnnnnnnnnnnnnnnnnnnnnnnnnnnnnnnnnnnnnnnnnnnnnnnnnnnnnnnnnnnnnnnnnnnnnnnnnnnnnnnnnnnnnnnnnnnnnnnnnnnnnnnnnnnnnnnnnnnnnnnnnnnnnnnnnnnnnnnnnnnnnnnnnnnnnnnnnnnnnnnnnnnnnnnnnnnnnnnnnnnnnnnnnnnnnnnnnnnnnnnnnnnnnnnnnnnnnnnnnnnnnnnnnnnnnnnnnnnnnnnnnnnnnnnnnnnnnnnnnnnnnnnnnnnnnnnnnnnnnnnnnnnnnnnnnnnnnnnnnnnnnnnnnnnnnnnnnnnnnnnnnnnnnnnnnnnnnnnnnnnnnnnnnnnnnnnnnnnnnnnnnnnnnnnnnnnnnnnnnnnnnnnnnnnnnnnnnnnnnnnnnnnnnnnnnnnnnnnnnnnnnnnnnnnnnnnnnnnnnnnnnnnnnnnnnnnnnnnnnnnnnnnnnnnnnnnnnnnnnnnnnnnnnnnnnnnnnnnnnnnnnnnnnnnnnnnnnnnnnnnnnnnnnnnnnnnnnnnnnnnnnnnnnnnnnnnnnnnnnnnnnnnnnnnnnnnnnnnnnnnnnnnnnnnnnnnnnnnnnnnnnnnnnnnnnnnnnnnnnnnnnnnnnnnnnnnnnnnnnnnnnnnnnnnnnnnnnnnnnnnnnnnnnnnnnnnnnnnnnnnnnnnnnnnnnnnnnnnnnnnnnnnnnnnnnnnnnnnnnnnnnnnnnnnnnnnnnnnnnnnnnnnnnnnnnnnnnnnnnnnnnnnnnnnnnnnnnnnnnnnnnnnnnnnnnnnnnnnnnnnnnnnnnnnnnnnnnnnnnnnnnnnnnnnnnnnnnnnnnnnnnnnnnnnnnnnnnnnnnnnnnnnnnnnnnnnnnnnnnnnnnnnnnnnnnnnnnnnnnnnnnnnnnnnnnnnnnnnnnnnnnnnnnnnnnnnnnnnnnnnnnnnnnnnnnnnnnnnnnnnnnnnnnnnnnnnnnnnnnnnnnnnnnnnnnnnnnnnnnnnnnnnnnnnnnnnnnnnnnnnnnnnnnnnnnnnnnnnnnnnnnnnnnnnnnnnnnnnnnnnnnnnnnnnnnnnnnnnnnnnnnnnnnnnnnnnnnnnnnnnnnnnnnnnnnnnnnnnnnnnnnnnnnnnnnnnnnnnnnnnnnnnnnnnnnnnnnnnnnnnnnnnnnnnnnnnnnnnnnnnnnnnnnnnnnnnnnnnnnnnnnnnnnnnnnnnnnnnnnnnnnnnnnnnnnnnnnnnnnnnnnnnnnnnnnnnnnnnnnnnnnnnnnnnnnnnnnnnnnnnnnnnnnnnnnnnnnnnnnnnnnnnnnnnnnnnnnnnnnnnnnnnnnnnnnnnnnnnnnnnnnnnnnnnnnnnnnnnnnnnnnnnnnnnnnnnnnnnnnnnnnnnnnnnnnnnnnnnnnnnnnnnnnnnnnnnnnnnnnnnnnnnnnnnnnnnnnnnnnnnnnnnnnnnnnnnnnnnnnnnnnnnnnnnnnnnnnnnnnnnnnnnnnnnnnnnnnnnnnnnnnnnnnnnnnnnnnnnnnnnnnnnnnnnnnnnnnnnnnnnnnnnnnnnnnnnnnnnnnnnnnnnnnnnnnnnnnnnnnnnnnnnnnnnnnnnnnnnnnnnnnnnnnnnnnnnnnnnnnnnnnnnnnnnnnnnnnnnnnnnnnnnnnnnnnnnnnnnnnnnnnnnnnnnnnnnnnnnnnnnnnnnnnnnnnnnnnnnnnnnnnnnnnnnnnnnnnnnnnnnnnnnnnnnnnnnnnnnnnnnnnnnnnnnnnnnnnnnnnnnnnnnnnnnnnnnnnnnnnnnnnnnnnnnnnnnnnnnnnnnnnnnnnnnnnnnnnnnnnnnnnnnnnnnnnnnnnnnnnnnnnnnnnnnnnnnnnnnnnnnnnnnnnnnnnnnnnnnnnnnnnnnnnnnnnnnnnnnnnnnnnnnnnnnnnnnnnnnnnnnnnnnnnnnnnnnnnnnnnnnnnnnnnnnnnnnnnnnnnnnnnnnnnnnnnnnnnnnnnnnnnnnnnnnnnnnnnnnnnnnnnnnnnnnnnnnnnnnnnnnnnnnnnnnnnnnnnnnnnnnnnnnnnnnnnnnnnnnnnnnnnnnnnnnnnnnnnnnnnnnnnnnnnnnnnnnnnnnnnnnnnnnnnnnnnnnnnnnnnnnnnnnnnnnnnnnnnnnnnnnnnnnnnnnnnnnnnnnnnnnnnnnnnnnnnnnnnnnnnnnnnnnnnnnnnnnnnnnnnnnnnnnnnnnnnnnnnnnnnnnnnnnnnnnnnnnnnnnnnnnnnnnnnnnnnnnnnnnnnnnnnnnnnnnnnnnnnnnnnnnnnnnnnnnnnnnnnnnnnnnnnnnnnnnnnnnnnnnnnnnnnnnnnnnnnnnnnnnnnnnnnnnnnnnnnnnnnnnnnnnnnnnnnnnnnnnnnnnnnnnnnnnnnnnnnnnnnnnnnnnnnnnnnnnnnnnnnnnnnnnnnnnnnnnnnnnnnnnnnnnnnnnnnnnnnnnnnnnnnnnnnnnnnnnnnnnnnnnnnnnnnnnnnnnnnnnnnnnnnnnnnnnnnnnnnnnnnnnnnnnnnnnnnnnnnnnnnnnnnnnnnnnnnnnnnnnnnnnnnnnnnnnnnnnnnnnnnnnnnnnnnnnnnnnnnnnnnnnnnnnnnnnnnnnnnnnnnnnnnnnnnnnnnnnnnnnnnnnnnnnnnnnnnnnnnnnnnnnnnnnnnnnnnnnnnnnnnnnnnnnnnnnnnnnnnnnnnnnnnnnnnnnnnnnnnnnnnnnnnnnnnnnnnnnnnnnnnnnnnnnnnnnnnnnnnnnnnnnnnnnnnnnnnnnnnnnnnnnnnnnnnnnnnnnnnnnnnnnnnnnnnnnnnnnnnnnnnnnnnnnnnnnnnnnnnnnnnnnnnnnnnnnnnnnnnnnnnnnnnnnnnnnnnnnnnnnnnnnnnnnnnnnnnnnnnnnnnnnnnnnnnnnnnnnnnnnnnnnnnnnnnnnnnnnnnnnnnnnnnnnnnnnnnnnnnnnnnnnnnnnnnnnnnnnnnnnnnnnnnnnnnnnnnnnnnnnnnnnnnnnnnnnnnnnnnnnnnnnnnnnnnnnnnnnnnnnnnnnnnnnnnnnnnnnnnnnnnnnnnnnnnnnnnnnnnnnnnnnnnnnnnnnnnnnnnnnnnnnnnnnnnnnnnnnnnnnnnnnnnnnnnnnnnnnnnnnnnnnnnnnnnnnnnnnnnnnnnnnnnnnnnnnnnnnnnnnnnnnnnnnnnnnnnnnnnnnnnnnnnnnnnnnnnnnnnnnnnnnnnnnnnnnnnnnnnnnnnnnnnnnnnnnnnnnnnnnnnnnnnnnnnnnnnnnnnnnnnnnnnnnnnnnnnnnnnnnnnnnnnnnnnnnnnnnnnnnnnnnnnnnnnnnnnnnnnnnnnnnnnnnnnnnnnnnnnnnnnnnnnnnnnnnnnnnnnnnnnnnnnnnnnnnnnnnnnnnnnnnnnnnnnnnnnnnnnnnnnnnnnnnnnnnnnnnnnnnnnnnnnnnnnnnnnnnnnnnnnnnnnnnnnnnnnnnnnnnnnnnnnnnnnnnnnnnnnnnnnnnnnnnnnnnnnnnnnnnnnnnnnnnnnnnnnnnnnnnnnnnnnnnnnnnnnnnnnnnnnnnnnnnnnnnnnnnnnnnnnnnnnnnnnnnnnnnnnnnnnnnnnnnnnnnnnnnnnnnnnnnnnnnnnnnnnnnnnnnnnnnnnnnnnnnnnnnnnnnnnnnnnnnnnnnnnnnnnnnnnnnnnnnnnnnnnnnnnnnnnnnnnnnnnnnnnnnnnnnnnnnnnnnnnnnnnnnnnnnnnnnnnnnnnnnnnnnnnnnnnnnnnnnnnnnnnnnnnnnnnnnnnnnnnnnnnnnnnnnnnnnnnnnnnnnnnnnnnnnnnnnnnnnnnnnnnnnnnnnnnnnnnnnnnnnnnnnnnnnnnnnnnnnnnnnnnnnnnnnnnnnnnnnnnnnnnnnnnnnnnnnnnnnnnnnnnnnnnnnnnnnnnnnnnnnnnnnnnnnnnnnnnnnnnnnnnnnnnnnnnnnnnnnnnnnnnnnnnnnnnnnnnnnnnnnnnnnnnnnnnnnnnnnnnnnnnnnnnnnnnnnnnnnnnnnnnnnnnnnnnnnnnnnnnnnnnnnnnnnnnnnnnnnnnnnnnnnnnnnnnnnnnnnnnnnnnnnnnnnnnnnnnnnnnnnnnnnnnnnnnnnnnnnnnnnnnnnnnnnnnnnnnnnnnnnnnnnnnnnnnnnnnnnnnnnnnnnnnnnnnnnnnnnnnnnnnnnnnnnnnnnnnnnnnnnnnnnnnnnnnnnnnnnnnnnnnnnnnnnnnnnnnnnnnnnnnnnnnnnnnnnnnnnnnnnnnnnnnnnnnnnnnnnnnnnnnnnnnnnnnnnnnnnnnnnnnnnnnnnnnnnnnnnnnnnnnnnnnnnnnnnnnnnnnnnnnnnnnnnnnnnnnnnnnnnnnnnnnnnnnnnnnnnnnnnnnnnnnnnnnnnnnnnnnnnnnnnnnnnnnnnnnnnnnnnnnnnnnnnnnnnnnnnnnnnnnnnnnnnnnnnnnnnnnnnnnnnnnnnnnnnnnnnnnnnnnnnnnnnnnnnnnnnnnnnnnnnnnnnnnnnnnnnnnnnnnnnnnnnnnnnnnnnnnnnnnnnnnnnnnnnnnnnnnnnnnnnnnnnnnnnnnnnnnnnnnnnnnnnnnnnnnnnnnnnnnnnnnnnnnnnnnnnnnnnnnnnnnnnnnnnnnnnnnnnnnnnnnnnnnnnnnnnnnnnnnnnnnnnnnnnnnnnnnnnnnnnnnnnnnnnnnnnnnnnnnnnnnnnnnnnnnnnnnnnnnnnnnnnnnnnnnnnnnnnnnnnnnnnnnnnnnnnnnnnnnnnnnnnnnnnnnnnnnnnnnnnnnnnnnnnnnnnnnnnnnnnnnnnnnnnnnnnnnnnnnnnnnnnnnnnnnnnnnnnnnnnnnnnnnnnnnnnnnnnnnnnnnnnnnnnnnnnnnnnnnnnnnnnnnnnnnnnnnnnnnnnnnnnnnnnnnnnnnnnnnnnnnnnnnnnnnnnnnnnnnnnnnnnnnnnnnnnnnnnnnnnnnnnnnnnnnnnnnnnnnnnnnnnnnnnnnnnnnnnnnnnnnnnnnnnnnnnnnnnnnnnnnnnnnnnnnnnnnnnnnnnnnnnnnnnnnnnnnnnnnnnnnnnnnnnnnnnnnnnnnnnnnnnnnnnnnnnnnnnnnnnnnnnnnnnnnnnnnnnnnnnnnnnnnnnnnnnnnnnnnnnnnnnnnnnnnnnnnnnnnnnnnnnnnnnnnnnnnnnnnnnnnnnnnnnnnnnnnnnnnnnnnnnnnnnnnnnnnnnnnnnnnnnnnnnnnnnnnnnnnnnnnnnnnnnnnnnnnnnnnnnnnnnnnnnnnnnnnnnnnnnnnnnnnnnnnnnnnnnnnnnnnnnnnnnnnnnnnnnnnnnnnnnnnnnnnnnnnnnnnnnnnnnnnnnnnnnnnnnnnnnnnnnnnnnnnnnnnnnnnnnnnnnnnnnnnnnnnnnnnnnnnnnnnnnnnnnnnnnnnnnnnnnnnnnnnnnnnnnnnnnnnnnnnnnnnnnnnnnnnnnnnnnnnnnnnnnnnnnnnnnnnnnnnnnnnnnnnnnnnnnnnnnnnnnnnnnnnnnnnnnnnnnnnnnnnnnnnnnnnnnnnnnnnnnnnnnnnnnnnnnnnnnnnnnnnnnnnnnnnnnnnnnnnnnnnnnnnnnnnnnnnnnnnnnnnnnnnnnnnnnnnnnnnnnnnnnnnnnnnnnnnnnnnnnnnnnnnnnnnnnnnnnnnnnnnnnnnnnnnnnnnnnnnnnnnnnnnnnnnnnnnnnnnnnnnnnnnnnnnnnnnnnnnnnnnnnnnnnnnnnnnnnnnnnnnnnnnnnnnnnnnnnnnnnnnnnnnnnnnnnnnnnnnnnnnnnnnnnnnnnnnnnnnnnnnnnnnnnnnnnnnnnnnnnnnnnnnnnnnnnnnnnnnnnnnnnnnnnnnnnnnnnnnnnnnnnnnnnnnnnnnnnnnnnnnnnnnnnnnnnnnnnnnnnnnnnnnnnnnnnnnnnnnnnnnnnnnnnnnnnnnnnnnnnnnnnnnnnnnnnnnnnnnnnnnnnnnnnnnnnnnnnnnnnnnnnnnnnnnnnnnnnnnnnnnnnnnnnnnnnnnnnnnnnnnnnnnnnnnnnnnnnnnnnnnnnnnnnnnnnnnnnnnnnnnnnnnnnnnnnnnnnnnnnnnnnnnnnnnnnnnnnnnnnnnnnnnnnnnnnnnnnnnnnnnnnnnnnnnnnnnnnnnnnnnnnnnnnnnnnnnnnnnnnnnnnnnnnnnnnnnnnnnnnnnnnnnnnnnnnnnnnnnnnnnnnnnnnnnnnnnnnnnnnnnnnnnnnnnnnnnnnnnnnnnnnnnnnnnnnnnnnnnnnnnnnnnnnnnnnnnnnnnnnnnnnnnnnnnnnnnnnnnnnnnnnnnnnnnnnnnnnnnnnnnnnnnnnnnnnnnnnnnnnnnnnnnnnnnnnnnnnnnnnnnnnnnnnnnnnnnnnnnnnnnnnnnnnnnnnnnnnnnnnnnnnnnnnnnnnnnnnnnnnnnnnnnnnnnnnnnnnnnnnnnnnnnnnnnnnnnnnnnnnnnnnnnnnnnnnnnnnnnnnnnnnnnnnnnnnnnnnnnnnnnnnnnnnnnnnnnnnnnnnnnnnnnnnnnnnnnnnnnnnnnnnnnnnnnnnnnnnnnnnnnnnnnnnnnnnnnnnnnnnnnnnnnnnnnnnnnnnnnnnnnnnnnnnnnnnnnnnnnnnnnnnnnnnnnnnnnnnnnnnnnnnnnnnnnnnnnnnnnnnnnnnnnnnnnnnnnnnnnnnnnnnnnnnnnnnnnnnnnnnnnnnnnnnnnnnnnnnnnnnnnnnnnnnnnnnnnnnnnnnnnnnnnnnnnnnnnnnnnnnnnnnnnnnnnnnnnnnnnnnnnnnnnnnnnnnnnnnnnnnnnnnnnnnnnnnnnnnnnnnnnnnnnnnnnnnnnnnnnnnnnnnnnnnnnnnnnnnnnnnnnnnnnnnnnnnnnnnnnnnnnnnnnnnnnnnnnnnnnnnnnnnnnnnnnnnnnnnnnnnnnnnnnnnnnnnnnnnnnnnnnnnnnnnnnnnnnnnnnnnnnnnnnnnnnnnnnnnnnnnnnnnnnnnnnnnnnnnnnnnnnnnnnnnnnnnnnnnnnnnnnnnnnnnnnnnnnnnnnnnnnnnnnnnnnnnnnnnnnnnnnnnnnnnnnnnnnnnnnnnnnnnnnnnnnnnnnnnnnnnnnnnnnnnnnnnnnnnnnnnnnnnnnnnnnnnnnnnnnnnnnnnnnnnnnnnnnnnnnnnnnnnnnnnnnnnnnnnnnnnnnnnnnnnnnnnnnnnnnnnnnnnnnnnnnnnnnnnnnnnnnnnnnnnnnnnnnnnnnnnnnnnnnnnnnnnnnnnnnnnnnnnnnnnnnnnnnnnnnnnnnnnnnnnnnnnnnnnnnnnnnnnnnnnnnnnnnnnnnnnnnnnnnnnnnnnnnnnnnnnnnnnnnnnnnnnnnnnnnnnnnnnnnnnnnnnnnnnnnnnnnnnnnnnnnnnnnnnnnnnnnnnnnnnnnnnnnnnnnnnnnnnnnnnnnnnnnnnnnnnnnnnnnnnnnnnnnnnnnnnnnnnnnnnnnnnnnnnnnnnnnnnnnnnnnnnnnnnnnnnnnnnnnnnnnnnnnnnnnnnnnnnnnnnnnnnnnnnnnnnnnnnnnnnnnnnnnnnnnnnnnnnnnnnnnnnnnnnnnnnnnnnnnnnnnnnnnnnnnnnnnnnnnnnnnnnnnnnnnnnnnnnnnnnnnnnnnnnnnnnnnnnnnnnnnnnnnnnnnnnnnnnnnnnnnnnnnnnnnnnnnnnnnnnnnnnnnnnnnnnnnnnnnnnnnnnnnnnnnnnnnnnnnnnnnnnnnnnnnnnnnnnnnnnnnnnnnnnnnnnnnnnnnnnnnnnnnnnnnnnnnnnnnnnnnnnnnnnnnnnnnnnnnnnnnnnnnnnnnnnnnnnnnnnnnnnnnnnnnnnnnnnnnnnnnnnnnnnnnnnnnnnnnnnnnnnnnnnnnnnnnnnnnnnnnnnnnnnnnnnnnnnnnnnnnnnnnnnnnnnnnnnnnnnnnnnnnnnnnnnnnnnnnnnnnnnnnnnnnnnnnnnnnnnnnnnnnnnnnnnnnnnnnnnnnnnnnnnnnnnnnnnnnnnnnnnnnnnnnnnnnnnnnnnnnnnnnnnnnnnnnnnnnnnnnnnnnnnnnnnnnnnnnnnnnnnnnnnnnnnnnnnnnnnnnnnnnnnnnnnnnnnnnnnnnnnnnnnnnnnnnnnnnnnnnnnnnnnnnnnnnnnnnnnnnnnnnnnnnnnnnnnnnnnnnnnnnnnnnnnnnnnnnnnnnnnnnnnnnnnnnnnnnnnnnnnnnnnnnnnnnnnnnnnnnnnnnnnnnnnnnnnnnnnnnnnnnnnnnnnnnnnnnnnnnnnnnnnnnnnnnnnnnnnnnnnnnnnnnnnnnnnnnnnnnnnnnnnnnnnnnnnnnnnnnnnnnnnnnnnnnnnnnnnnnnnnnnnnnnnnnnnnnnnnnnnnnnnnnnnnnnnnnnnnnnnnnnnnnnnnnnnnnnnnnnnnnnnnnnnnnnnnnnnnnnnnnnnnnnnnnnnnnnnnnnnnnnnnnnnnnnnnnnnnnnnnnnnnnnnnnnnnnnnnnnnnnnnnnnnnnnnnnnnnnnnnnnnnnnnnnnnnnnnnnnnnnnnnnnnnnnnnnnnnnnnnnnnnnnnnnnnnnnnnnnnnnnnnnnnnnnnnnnnnnnnnnnnnnnnnnnnnnnnnnnnnnnnnnnnnnnnnnnnnnnnnnnnnnnnnnnnnnnnnnnnnnnnnnnnnnnnnnnnnnnnnnnnnnnnnnnnnnnnnnnnnnnnnnnnnnnnnnnnnnnnnnnnnnnnnnnnnnnnnnnnnnnnnnnnnnnnnnnnnnnnnnnnnnnnnnnnnnnnnnnnnnnnnnnnnnnnnnnnnnnnnnnnnnnnnnnnnnnnnnnnnnnnnnnnnnnnnnnnnnnnnnnnnnnnnnnnnnnnnnnnnnnnnnnnnnnnnnnnnnnnnnnnnnnnnnnnnnnnnnnnnnnnnnnnnnnnnnnnnnnnnnnnnnnnnnnnnnnnnnnnnnnnnnnnnnnnnnnnnnnnnnnnnnnnnnnnnnnnnnnnnnnnnnnnnnnnnnnnnnnnnnnnnnnnnnnnnnnnnnnnnnnnnnnnnnnnnnnnnnnnnnnnnnnnnnnnnnnnnnnnnnnnnnnnnnnnnnnnnnnnnnnnnnnnnnnnnnnnnnnnnnnnnnnnnnnnnnnnnnnnnnnnnnnnnnnnnnnnnnnnnnnnnnnnnnnnnnnnnnnnnnnnnnnnnnnnnnnnnnnnnnnnnnnnnnnnnnnnnnnnnnnnnnnnnnnnnnnnnnnnnnnnnnnnnnnnnnnnnnnnnnnnnnnnnnnnnnnnnnnnnnnnnnnnnnnnnnnnnnnnnnnnnnnnnnnnnnnnnnnnnnnnnnnnnnnnnnnnnnnnnnnnnnnnnnnnnnnnnnnnnnnnnnnnnnnnnnnnnnnnnnnnnnnnnnnnnnnnnnnnnnnnnnnnnnnnnnnnnnnnnnnnnnnnnnnnnnnnnnnnnnnnnnnnnnnnnnnnnnnnnnnnnnnnnnnnnnnnnnnnnnnnnnnnnnnnnnnnnnnnnnnnnnnnnnnnnnnnnnnnnnnnnnnnnnnnnnnnnnnnnnnnnnnnnnnnnnnnnnnnnnnnnnnnnnnnnnnnnnnnnnnnnnnnnnnnnnnnnnnnnnnnnnnnnnnnnnnnnnnnnnnnnnnnnnnnnnnnnnnnnnnnnnnnnnnnnnnnnnnnnnnnnnnnnnnnnnnnnnnnnnnnnnnnnnnnnnnnnnnnnnnnnnnnnnnnnnnnnnnnnnnnnnnnnnnnnnnnnnnnnnnnnnnnnnnnnnnnnnnnnnnnnnnnnnnnnnnnnnnnnnnnnnnnnnnnnnnnnnnnnnnnnnnnnnnnnnnnnnnnnnnnnnnnnnnnnnnnnnnnnnnnnnnnnnnnnnnnnnnnnnnnnnnnnnnnnnnnnnnnnnnnnnnnnnnnnnnnnnnnnnnnnnnnnnnnnnnnnnnnnnnnnnnnnnnnnnnnnnnnnnnnnnnnnnnnnnnnnnnnnnnnnnnnnnnnnnnnnnnnnnnnnnnnnnnnnnnnnnnnnnnnnnnnnnnnnnnnnnnnnnnnnnnnnnnnnnnnnnnnnnnnnnnnnnnnnnnnnnnnnnnnnnnnnnnnnnnnnnnnnnnnnnnnnnnnnnnnnnnnnnnnnnnnnnnnnnnnnnnnnnnnnnnnnnnnnnnnnnnnnnnnnnnnnnnnnnnnnnnnnnnnnnnnnnnnnnnnnnnnnnnnnnnnnnnnnnnnnnnnnnnnnnnnnnnnnnnnnnnnnnnnnnnnnnnnnnnnnnnnnnnnnnnnnnnnnnnnnnnnnnnnnnnnnnnnnnnnnnnnnnnnnnnnnnnnnnnnnnnnnnnnnnnnnnnnnnnnnnnnnnnnnnnnnnnnnnnnnnnnnnnnnnnnnnnnnnnnnnnnnnnnnnnnnnnnnnnnnnnnnnnnnnnnnnnnnnnnnnnnnnnnnnnnnnnnnnnnnnnnnnnnnnnnnnnnnnnnnnnnnnnnnnnnnnnnnnnnnnnnnnnnnnnnnnnnnnnnnnnnnnnnnnnnnnnnnnnnnnnnnnnnnnnnnnnnnnnnnnnnnnnnnnnnnnnnnnnnnnnnnnnnnnnnnnnnnnnnnnnnnnnnnnnnnnnnnnnnnnnnnnnnnnnnnnnnnnnnnnnnnnnnnnnnnnnnnnnnnnnnnnnnnnnnnnnnnnnnnnnnnnnnnnnnnnnnnnnnnnnnnnnnnnnnnnnnnnnnnnnnnnnnnnnnnnnnnnnnnnnnnnnnnnnnnnnnnnnnnnnnnnnnnnnnnnnnnnnnnnnnnnnnnnnnnnnnnnnnnnnnnnnnnnnnnnnnnnnnnnnnnnnnnnnnnnnnnnnnnnnnnnnnnnnnnnnnnnnnnnnnnnnnnnnnnnnnnnnnnnnnnnnnnnnnnnnnnnnnnnnnnnnnnnnnnnnnnnnnnnnnnnnnnnnnnnnnnnnnnnnnnnnnnnnnnnnnnnnnnnnnnnnnnnnnnnnnnnnnnnnnnnnnnnnnnnnnnnnnnnnnnnnnnnnnnnnnnnnnnnnnnnnnnnnnnnnnnnnnnnnnnnnnnnnnnnnnnnnnnnnnnnnnnnnnnnnnnnnnnnnnnnnnnnnnnnnnnnnnnnnnnnnnnnnnnnnnnnnnnnnnnnnnnnnnnnnnnnnnnnnnnnnnnnnnnnnnnnnnnnnnnnnnnnnnnnnnnnnnnnnnnnnnnnnnnnnnnnnnnnnnnnnnnnnnnnnnnnnnnnnnnnnnnnnnnnnnnnnnnnnnnnnnnnnnnnnnnnnnnnnnnnnnnnnnnnnnnnnnnnnnnnnnnnnnnnnnnnnnnnnnnnnnnnnnnnnnnnnnnnnnnnnnnnnnnnnnnnnnnnnnnnnnnnnnnnnnnnnnnnnnnnnnnnnnnnnnnnnnnnnnnnnnnnnnnnnnnnnnnnnnnnnnnnnnnnnnnnnnnnnnnnnnnnnnnnnnnnnnnnnnnnnnnnnnnnnnnnnnnnnnnnnnnnnnnnnnnnnnnnnnnnnnnnnnnnnnnnnnnnnnnnnnnnnnnnnnnnnnnnnnnnnnnnnnnnnnnnnnnnnnnnnnnnnnnnnnnnnnnnnnnnnnnnnnnnnnnnnnnnnnnnnnnnnnnnnnnnnnnnnnnnnnnnnnnnnnnnnnnnnnnnnnnnnnnnnnnnnnnnnnnnnnnnnnnnnnnnnnnnnnnnnnnnnnnnnnnnnnnnnnnnnnnnnnnnnnnnnnnnnnnnnnnnnnnnnnnnnnnnnnnnnnnnnnnnnnnnnnnnnnnnnnnnnnnnnnnnnnnnnnnnnnnnnnnnnnnnnnnnnnnnnnnnnnnnnnnnnnnnnnnnnnnnnnnnnnnnnnnnnnnnnnnnnnnnnnnnnnnnnnnnnnnnnnnnnnnnnnnnnnnnnnnnnnnnnnnnnnnnnnnnnnnnnnnnnnnnnnnnnnnnnnnnnnnnnnnnnnnnnnnnnnnnnnnnnnnnnnnnnnnnnnnnnnnnnnnnnnnnnnnnnnnnnnnnnnnnnnnnnnnnnnnnnnnnnnnnnnnnnnnnnnnnnnnnnnnnnnnnnnnnnnnnnnnnnnnnnnnnnnnnnnnnnnnnnnnnnnnnnnnnnnnnnnnnnnnnnnnnnnnnnnnnnnnnnnnnnnnnnnnnnnnnnnnnnnnnnnnnnnnnnnnnnnnnnnnnnnnnnnnnnnnnnnnnnnnnnnnnnnnnnnnnnnnnnnnnnnnnnnnnnnnnnnnnnnnnnnnnnnnnnnnnnnnnnnnnnnnnnnnnnnnnnnnnnnnnnnnnnnnnnnnnnnnnnnnnnnnnnnnnnnnnnnnnnnnnnnnnnnnnnnnnnnnnnnnnnnnnnnnnnnnnnnnnnnnnnnnnnnnnnnnnnnnnnnnnnnnnnnnnnnnnnnnnnnnnnnnnnnnnnnnnnnnnnnnnnnnnnnnnnnnnnnnnnnnnnnnnnnnnnnnnnnnnnnnnnnnnnnnnnnnnnnnnnnnnnnnnnnnnnnnnnnnnnnnnnnnnnnnnnnnnnnnnnnnnnnnnnnnnnnnnnnnnnnnnnnnnnnnnnnnnnnnnnnnnnnnnnnnnnnnnnnnnnnnnnnnnnnnnnnnnnnnnnnnnnnnnnnnnnnnnnnnnnnnnnnnnnnnnnnnnnnnnnnnnnnnnnnnnnnnnnnnnnnnnnnnnnnnnnnnnnnnnnnnnnnnnnnnnnnnnnnnnnnnnnnnnnnnnnnnnnnnnnnnnnnnnnnnnnnnnnnnnnnnnnnnnnnnnnnnnnnnnnnnnnnnnnnnnnnnnnnnnnnnnnnnnnnnnnnnnnnnnnnnnnnnnnnnnnnnnnnnnnnnnnnnnnnnnnnnnnnnnnnnnnnnnnnnnnnnnnnnnnnnnnnnnnnnnnnnnnnnnnnnnnnnnnnnnnnnnnnnnnnnnnnnnnnnnnnnnnnnnnnnnnnnnnnnnnnnnnnnnnnnnnnnnnnnnnnnnnnnnnnnnnnnnnnnnnnnnnnnnnnnnnnnnnnnnnnnnnnnnnnnnnnnnnnnnnnnnnnnnnnnnnnnnnnnnnnnnnnnnnnnnnnnnnnnnnnnnnnnnnnnnnnnnnnnnnnnnnnnnnnnnnnnnnnnnnnnnnnnnnnnnnnnnnnnnnnnnnnnnnnnnnnnnnnnnnnnnnnnnnnnnnnnnnnnnnnnnnnnnnnnnnnnnnnnnnnnnnnnnnnnnnnnnnnnnnnnnnnnnnnnnnnnnnnnnnnnnnnnnnnnnnnnnnnnnnnnnnnnnnnnnnnnnnnnnnnnnnnnnnnnnnnnnnnnnnnnnnnnnnnnnnnnnnnnnnnnnnnnnnnnnnnnnnnnnnnnnnnnnnnnnnnnnnnnnnnnnnnnnnnnnnnnnnnnnnnnnnnnnnnnnnnnnnnnnnnnnnnnnnnnnnnnnnnnnnnnnnnnnnnnnnnnnnnnnnnnnnnnnnnnnnnnnnnnnnnnnnnnnnnnnnnnnnnnnnnnnnnnnnnnnnnnnnnnnnnnnnnnnnnnnnnnnnnnnnnnnnnnnnnnnnnnnnnnnnnnnnnnnnnnnnnnnnnnnnnnnnnnnnnnnnnnnnnnnnnnnnnnnnnnnnnnnnnnnnnnnnnnnnnnnnnnnnnnnnnnnnnnnnnnnnnnnnnnnnnnnnnnnnnnnnnnnnnnnnnnnnnnnnnnnnnnnnnnnnnnnnnnnnnnnnnnnnnnnnnnnnnnnnnnnnnnnnnnnnnnnnnnnnnnnnnnnnnnnnnnnnnnnnnnnnnnnnnnnnnnnnnnnnnnnnnnnnnnnnnnnnnnnnnnnnnnnnnnnnnnnnnnnnnnnnnnnnnnnnnnnnnnnnnnnnnnnnnnnnnnnnnnnnnnnnnnnnnnnnnnnnnnnnnnnnnnnnnnnnnnnnnnnnnnnnnnnnnnnnnnnnnnnnnnnnnnnnnnnnnnnnnnnnnnnnnnnnnnnnnnnnnnnnnnnnnnnnnnnnnnnnnnnnnnnnnnnnnnnnnnnnnnnnnnnnnnnnnnnnnnnnnnnnnnnnnnnnnnnnnnnnnnnnnnnnnnnnnnnnnnnnnnnnnnnnnnnnnnnnnnnnnnnnnnnnnnnnnnnnnnnnnnnnnnnnnnnnnnnnnnnnnnnnnnnnnnnnnnnnnnnnnnnnnnnnnnnnnnnnnnnnnnnnnnnnnnnnnnnnnnnnnnnnnnnnnnnnnnnnnnnnnnnnnnnnnnnnnnnnnnnnnnnnnnnnnnnnnnnnnnnnnnnnnnnnnnnnnnnnnnnnnnnnnnnnnnnnnnnnnnnnnnnnnnnnnnnnnnnnnnnnnnnnnnnnnnnnnnnnnnnnnnnnnnnnnnnnnnnnnnnnnnnnnnnnnnnnnnnnnnnnnnnnnnnnnnnnnnnnnnnnnnnnnnnnnnnnnnnnnnnnnnnnnnnnnnnnnnnnnnnnnnnnnnnnnnnnnnnnnnnnnnnnnnnnnnnnnnnnnnnnnnnnnnnnnnnnnnnnnnnnnnnnnnnnnnnnnncccccgcctacaacaacgctccggctactgttgtgaacagcgcccctgctacgacggctacgactactggcgccaatggcgcgtccactgcgaacgcgaacgccaatgcgaatgcgaacggcggcaacagcccctactcgaccaagacggtctccgtcacgaacggagacggcacgtcgaacacggcgtccgtgtcgaacggaaatggtgccgccgcgacgggtggtgcatcagcgagtgctacggccagcgccagtgcgagtgcgtctgctcgggtcacggctggagtgggggccacgtcgtctcagaagacgtactgccagcttcgctcggtggaatgagcgaggcaagtgtaccctcttaggggagctcgtcgaggtgccgtgagcacctcttggtgaacgaacgggctttgtgtcgcgtgcgcggtttcgagtcgtcttgctgtgattttctcctcgtagcgtatgatggatgttgttcttttggtcgtttgagtaaggagtttcaatgcaatgcaatgcaatgaattcgaaggtttgtgtgagactttgcgcattcgagtgcgtgttgtaacagcacagttgttggcctgtggttttgtatatacgcacccggcagcaggcagagaaacagaaaaaagcaaacacctctggacagtatgcttctcgttgcgctcgcttgtcgctagtgttagatcataccaaagtcaaggcagcaattcgatccgatactttgggatttcctggtctccgattggttgagtgcaacttcaacaaagaacatacaaatactagtatgaagcagatcattcaaaatcaaagtagaatcgccaaggccgggccaacacgagccgagccgagccgagcagagtacagccgagcagagtaaagcagagcagagccaagtagcctttgaggttgcagtatgtagtagcatcaaccgtgtacgcaggttatcatcgttcagcgtgccgcgccttcgccacgtgtcgtccacatcaagaagcttgccaaggcctcgacactacagttccatcaccattggtgattcaccaagctgagccgtggaatgcgaataagaacgggtagagagtaggaaccgacaaaaggtccccgccatacagaaattcgggcaaaacatacagaggtgcgcatccaaaacatacatacaaaaactgcacaaacgccacatgtttggattagcacacggcgtcgatcttgccaagaagccgcattcgtaatcttgccaagcagcagaattctcgtaactccgccgtggggcagaattactttttcacgcttgtactgcatagcaaggcaaagtccgtgtcgaactatgcactgaaaatttaacggcggtgattaaggcagtgtaacaaggctcaatgcttgctcacaaagtttgtatacgcagtacactggcatttgtagtccgtcaatcgaaaagccgattgatggaatttgaaatcctggattctccagaagagcctgattgatgtattagcttaatcactcaatcggaagacattcgatctacgtctgtagatttcacttctgaatttcgacacagggacgcgtatcgccagctccatgactcgctaccctcgttacggtttcccgggctcgactgatacgtgttgcagaaggacgatgggacttccacgagggggcagcgggtatactgggcgaagaaagcaaccagctcctactgcgatcttaacaagcatgtcgtgtcaattcaagtgcgtcggagtggcagatgcaacttatctctgccgcgactcgagggtgaacggcagcagtatgattcctcgtatgtacgaaatcggccgagcgcaattgcgagaaacacggtccacggttgcgacgatccgtccactaccgctgctgcatgtgaggtggcttcttttagtgatcatgcgactggcgaaactgcaagtgctgcattccatgtacctgataaaagtgctgctgtgcagaagggcctggcctgcgtgaaaactacatggaaagtttttgctatcatcgacaggactgcagtcggtcgaggttttcgataccgcgttaagtggtgtgacgaactggatggtcatcggtgggaagacacttgggagcctggtttcatgttacgcaaggatggttttagcgatggttgcagtattgtagacgcatggaaagcttccgacgaggcagacttctaccgcttctgcagcaagaatgggcatgtccatttagtgggagcttcgcctaaaggtatgtgcgccgttttatgctgtaggtgtcgctgcgaagctactagggatcactggctggaactcgtcaagcgtggctcaagattttatttcctactgcgccaaccggggtcggcctatttctcctagtggattaacctacggtgagcttcgacactacgtgagatttgtgaatgggcgtaataccactggaggacagatcagtatgtccgcactggacaaaaacttactgggtggagtgaatggaaagctggccggccaacgtctgcgtgtaatcgatttaacggaaggtggatacgtttgtgccgcattcaacttgatgggagtaagccattgtatcgccatccacgttgtctgtggtgagaagtacgtctacgatgaggaaaacgattcggtcgctttaggcgcctatgatttggactggatttacgggatctcttttctgcgtagagtggcgttgtacgtcaagtgattgcctttacagcgatgctgtcacaagttcgaacatcgtttttttatagggagttgttgccgtctgcgggactaactcacacaaggtagcaccctaagtatcaatacgtatttatatacagtgagttccatctcgttttcattcttttttttgattgcagctcacagatcgacaaatatttacagtgtattctattaatacaatgggtttcatagaattttcattcctttgcagcacacaaagcgatcaattacgacgatgcgtcttcaccaagcagtctggttgtatgcttccctccacggcaacgattatgcgcgagcgtacgctaaggagcgactacaactgtcagaggatgctcgtcgtgtccgcgattcgaagtggctacttaacaaagggggtgtccgtcttcgtgagcagtggcgtgcgcttccttctccaaaacggcgacggcttcttcaggagacacctgacctgtcgtttccagaaggggttgatggaatactagatgaaaggcgtcgagttccagacccccgctgcagagctcccaccaagcttacaagatgcaaatcaagtgatcgctacacatgagctcgaacctacgaccgcgacccccgctgcagagctctcgccaagcttacaagaggcaaatgaagtgatcgctacacatgaactcgaacctacgaccgccaccctcgtcacagaacctacctcgacagaagagcggtcgtctcctgcgattcaactctcgccgtcagtcttgaagtccgcacgggagttgtctgctactgatatgacatcgccagatgtggccgacaaagtagttcgcatggcgaatgcacgcagcaattaccaccaaatactgtgcgaagagcatcgattgcgtgtccgcgctgaatacaaccgcggaagcctcgcaggggtgctcgagtcagcggcatctagtgtcattagcgctgtggctctagctaaggctgattgcccaacaacgagtgacgaggcttttgctgcagtttgtacacgacttacgtgtgttctaggaacgatgttgggaacagctcannnnnnnnnnnnnnnnnnnnnnnnnnnnnnnnnnnnnnnnnnnnnnnnnnnnnnnnnnnnnnnnnnnnnnnnnnnnnnnnnnnnnnnnnnnnnnnnnnnnnnnnnnnnnnnnnnnnnnnnnnnnnnnnnnnnnnnnnnnnnnnnnnnnnnnnnnnnnnnnnnnnnnnnnnnnnnnnnnnnnnnnnnnnnnnnnnnnnnnnnnnnnnnnnnnnnnnnnnnnnnnnnnnnnnnnnnnnnnnnnnnnnnnnnnnnnnnnnnnnnnnnnnnnnnnnnnnnnnnnnnnnnnnnnnnnnnnnnnnnnnnnnnnnnnnnnnnnnnnnnnnnnnnnnnnnnnnnnnnnnnnnnnnnnnnnnnnnnnnnnnnnnnnnnnnnnnnnnnnnnnnnnnnnnnnnnnnnnnnnnnnnnnnnnnnnnnnnnnnnnnnnnnnnnnnnnnnnnnnnnnnnnnnnnnnnnnnnnnnnnnnnnnnnnnnnnnnnnnnnnnnnnnnnnnnnnnnnnnnnnnnnnnnnnnnnnnnnnnnnnnnnnnnnnnnnnnnnnnnnnnnnnnnnnnnnnnnnnnnnnnnnnnnnnnnnnnnnnnnnnnnnnnnnnnnnnnnnnnnnnnnnnnnnnnnnnnnnnnnnnnnnnnnnnnnnnnnnnnnnnnnnnnnnnnnnnnnnnnnnnnnnnnnnnnnnnnnnnnnnnnnnnnnnnnnnnnnnnnnnnnnnnnnnnnnnnnnnnnnnnnnnnnnnnnnnnnnnnnnnnnnnnnnnnnnnnnnnnnnnnnnnnnnnnnnnnnnnnnnnnnnnnnnnnnnnnnnnnnnnnnnnnnnnnnnnnnnnnnnnnnnnnnnnnnnnnnnnnnnnnnnnnnnnnnnnnnnnnnnnnnnnnnnnnnnnnnnnnnnnnnnnnnnnnnnnnnnnnnnnnnnnnnnnnnnnnnnnnnnnnnnnnnnnnnnnnnnnnnnnnnnnnnnnnnnnnnnnnnnnnnnnnnnnnnnnnnnnnnnnnnnnnnnnnnnnnnnnnnnnnnnnnnnnnnnnnnnnnnnnnnnnnnnnnnnnnnnnnnnnnnnnnnnnnnnnnnnnnnnnnnnnnnnnnnnnnnnnnnnnnnnnnnnnnnnnnnnnnnnnnnnnnnnnnnnnnnnnnnnnnnnnnnnnnnnnnnnnnnnnnnnnnnnnnnnnnnnnnnnnnnnnnnnnnnnnnnnnnnnnnnnnnnnnnnnnnnnnnnnnnnnnnnnnnnnnnnnnnnnnnnnnnnnnnnnnnnnnnnnnnnnnnnnnnnnnnnnnnnnnnnnnnnnnnnnnnnnnnnnnnnnnnnnnnnnnnnnnnnnnnnnnnnnnnnnnnnnnnnnnnnnnnnnnnnnnnnnnnnnnnnnnnnnnnnnnnnnnnnnnnnnnnnnnnnnnnnnnnnnnnnnnnnnnnnnnnnnnnnnnnnnnnnnnnnnnnnnnnnnnnnnnnnnnnnnnnnnnnnnnnnnnnnnnnnnnnnnnnnnnnnnnnnnnnnnnnnnnnnnnnnnnnnnnnnnnnnnnnnnnnnnnnnnnnnnnnnnnnnnnnnnnnnnnnnnnnnnnnnnnnnnnnnnnnnnnnnnnnnnnnnnnnnnnnnnnnnnnnnnnnnnnnnnnnnnnnnnnnnnnnnnnnnnnnnnnnnnnnnnnnnnnnnnnnnnnnnnnnnnnnnnnnnnnnnnnnnnnnnnnnnnnnnnnnnnnnnnnnnnnnnnnnnnnnnnnnnnnnnnnnnnnnnnnnnnnnnnnnnnnnnnnnnnnnnnnnnnnnnnnnnnnnnnnnnnnnnnnnnnnnnnnnnnnnnnnnnnnnnnnnnnnnnnnnnnnnnnnnnnnnnnnnnnnnnnnnnnnnnnnnnnnnnnnnnnnnnnnnnnnnnnnnnnnnnnnnnnnnnnnnnnnnnnnnnnnnnnnnnnnnnnnnnnnnnnnnnnnnnnnnnnnnnnnnnnnnnnnnnnnnnnnnnnnnnnnnnnnnnnnnnnnnnnnnnnnnnnnnnnnnnnnnnnnnnnnnnnnnnnnnnnnnnnnnnnnnnnnnnnnnnnnnnnnnnnnnnnnnnnnnnnnnnnnnnnnnnnnnnnnnnnnnnnnnnnnnnnnnnnnnnnnnnnnnnnnnnnnnnnnnnnnnnnnnnnnnnnnnnnnnnnnnnnnnnnnnnnnnnnnnnnnnnnnnnnnnnnnnnnnnnnnnnnnnnnnnnnnnnnnnnnnnnnnnnnnnnnnnnnnnnnnnnnnnnnnnnnnnnnnnnnnnnnnnnnnnnnnnnnnnnnnnnnnnnnnnnnnnnnnnnnnnnnnnnnnnnnnnnnnnnnnnnnnnnnnnnnnnnnnnnnnnnnnnnnnnnnnnnnnnnnnnnnnnnnnnnnnnnnnnnnnnnnnnnnnnnnnnnnnnnnnnnnnnnnnnnnnnnnnnnnnnnnnnnnnnnnnnnnnnnnnnnnnnnnnnnnnnnnnnnnnnnnnnnnnnnnnnnnnnnnnnnnnnnnnnnnnnnnnnnnnnnnnnnnnnnnnnnnnnnnnnnnnnnnnnnnnnnnnnnnnnnnnnnnnnnnnnnnnnnnnnnnnnnnnnnnnnnnnnnnnnnnnnnnnnnnnnnnnnnnnnnnnnnnnnnnnnnnnnnnnnnnnnnnnnnnnnnnnnnnnnnnnnnnnnnnnnnnnnnnnnnnnnnnnnnnnnnnnnnnnnnnnnnnnnnnnnnnnnnnnnnnnnnnnnnnnnnnnnnnnnnnnnnnnnnnnnnnnnnnnnnnnnnnnnnnnnnnnnnnnnnnnnnnnnnnnnnnnnnnnnnnnnnnnnnnnnnnnnnnnnnnnnnnnnnnnnnnnnnnnnnnnnnnnnnnnnnnnnnnnnnnnnnnnnnnnnnnnnnnnnnnnnnnnnnnnnnnnnnnnnnnnnnnnnnnnnnnnnnnnnnnnnnnnnnnnnnnnnnnnnnnnnnnnnnnnnnnnnnnnnnnnnnnnnnnnnnnnnnnnnnnnnnnnnnnnnnnnnnnnnnnnnnnnnnnnnnnnnnnnnnnnnnnnnnnnnnnnnnnnnnnnnnnnnnnnnnnnnnnnnnnnnnnnnnnnnnnnnnnnnnnnnnnnnnnnnnnnnnnnnnnnnnnnnnnnnnnnnnnnnnnnnnnnnnnnnnnnnnnnnnnnnnnnnnnnnnnnnnnnnnnnnnnnnnnnnnnnnnnnnnnnnnnnnnnnnnnnnnnnnnnnnnnnnnnnnnnnnnnnnnnnnnnnnnnnnnnnnnnnnnnnnnnnnnnnnnnnnnnnnnnnnnnnnnnnnnnnnnnnnnnnnnnnnnnnnnnnnnnnnnnnnnnnnnnnnnnnnnnnnnnnnnnnnnnnnnnnnnnnnnnnnnnnnnnnnnnnnnnnnnnnnnnnnnnnnnnnnnnnnnnnnnnnnnnnnnnnnnnnnnnnnnnnnnnnnnnnnnnnnnnnnnnnnnnnnnnnnnnnnnnnnnnnnnnnnnnnnnnnnnnnnnnnnnnnnnnnnnnnnnnnnnnnnnnnnnnnnnnnnnnnnnnnnnnnnnnnnnnnnnnnnnnnnnnnnnnnnnnnnnnnnnnnnnnnnnnnnnnnnnnnnnnnnnnnnnnnnnnnnnnnnnnnnnnnnnnnnnnnnnnnnnnnnnnnnnnnnnnnnnnnnnnnnnnnnnnnnnnnnnnnnnnnnnnnnnnnnnnnnnnnnnnnnnnnnnnnnnnnnnnnnnnnnnnnnnnnnnnnnnnnnnnnnnnnnnnnnnnnnnnnnnnnnnnnnnnnnnnnnnnnnnnnnnnnnnnnnnnnnnnnnnnnnnnnnnnnnnnnnnnnnnnnnnnnnnnnnnnnnnnnnnnnnnnnnnnnnnnnnnnnnnnnnnnnnnnnnnnnnnnnnnnnnnnnnnnnnnnnnnnnnnnnnnnnnnnnnnnnnnnnnnnnnnnnnnnnnnnnnnnnnnnnnnnnnnnnnnnnnnnnnnnnnnnnnnnnnnnnnnnnnnnnnnnnnnnnnnnnnnnnnnnnnnnnnnnnnnnnnnnnnnnnnnnnnnnnnnnnnnnnnnnnnnnnnnnnnnnnnnnnnnnnnnnnnnnnnnnnnnnnnnnnnnnnnnnnnnnnnnnnnnnnnnnnnnnnnnnnnnnnnnnnnnnnnnnnnnnnnnnnnnnnnnnnnnnnnnnnnnnnnnnnnnnnnnnnnnnnnnnnnnnnnnnnnnnnnnnnnnnnnnnnnnnnnnnnnnnnnnnnnnnnnnnnnnnnnnnnnnnnnnnnnnnnnnnnnnnnnnnnnnnnnnnnnnnnnnnnnnnnnnnnnnnnnnnnnnnnnnnnnnnnnnnnnnnnnnnnnnnnnnnnnnnnnnnnnnnnnnnnnnnnnnnnnnnnnnnnnnnnnnnnnnnnnnnnnnnnnnnnnnnnnnnnnnnnnnnnnnnnnnnnnnnnnnnnnnnnnnnnnnnnnnnnnnnnnnnnnnnnnnnnnnnnnnnnnnnnnnnnnnnnnnnnnnnnnnnnnnnnnnnnnnnnnnnnnnnnnnnnnnnnnnnnnnnnnnnnnnnnnnnnnnnnnnnnnnnnnnnnnnnnnnnnnnnnnnnnnnnnnnnnnnnnnnnnnnnnnnnnnnnnnnnnnnnnnnnnnnnnnnnnnnnnnnnnnnnnnnnnnnnnnnnnnnnnnnnnnnnnnnnnnnnnnnnnnnnnnnnnnnnnnnnnnnnnnnnnnnnnnnnnnnnnnnnnnnnnnnnnnnnnnnnnnnnnnnnnnnnnnnnnnnnnnnnnnnnnnnnnnnnnnnnnnnnnnnnnnnnnnnnnnnnnnnnnnnnnnnnnnnnnnnnnnnnnnnnnnnnnnnnnnnnnnnnnnnnnnnnnnnnnnnnnnnnnnnnnnnnnnnnnnnnnnnnnnnnnnnnnnnnnnnnnnnnnnnnnnnnnnnnnnnnnnnnnnnnnnnnnnnnnnnnnnnnnnnnnnnnnnnnnnnnnnnnnnnnnnnnnnnnnnnnnnnnnnnnnnnnnnnnnnnnnnnnnnnnnnnnnnnnnnnnnnnnnnnnnnnnnnnnnnnnnnnnnnnnnnnnnnnnnnnnnnnnnnnnnnnnnnnnnnnnnnnnnnnnnnnnnnnnnnnnnnnnnnnnnnnnnnnnnnnnnnnnnnnnnnnnnnnnnnnnnnnnnnnnnnnnnnnnnnnnnnnnnnnnnnnnnnnnnnnnnnnnnnnnnnnnnnnnnnnnnnnnnnnnnnnnnnnnnnnnnnnnnnnnnnnnnnnnnnnnnnnnnnnnnnnnnnnnnnnnnnnnnnnnnnnnnnnnnnnnnnnnnnnnnnnnnnnnnnnnnnnnnnnnnnnnnnnnnnnnnnnnnnnnnnnnnnnnnnnnnnnnnnnnnnnnnnnnnnnnnnnnnnnnnnnnnnnngaacggcagcagtatgattcctcgtatgtacgaaatcggccgagcgcaattgcgagaaacacggtccacggttgcgacgatccgtccactaccgctgctgcatgtgaggtggcttcttttagtgatcatgcgactggcgaaactgcaagtgctgcattccatgtacctgataaaagtgctgctgtgcagaagggcctggcctgcgtgaaaactacatggaaagcttttgctatcatcgacaggactgcagtcggtcgaggttttcgataccgcgttaagtggtgtgacgaactggatggtcatcggtgggaagacacttgggagcctggtttcatgttacgcaaggatggttttagcgatggttgcagtattgtagacgcatggaaagcttccgacgaggcagacttctaccgcttctgcagcaagaatgggcatgtccatttagtgggagcttcgcctaaaggtatgtgcgccgttttatgctgtaggtgtcgctgcgaagctactagggatcactggctggaactcgtcaagcgtggctcaagattttatttcctactgcgccaaccggggtcggcctatttctcctagtggattaacctacggtgagcttcgacactacgtgagatttgtgaatgggcgtaatacagatcagtatgtccgcactggacaaaaacttactgggtggagtgaatggaaagctggccggccaacgtctgcgtgtaatcgatttaacggaaggtggatacgtttgtgccgcattcaacttgatgggagtaagccattgtatcgccatccacgttgtctgtggtgagaagtacgtctacgatgaggaaaacgattcggtcgctttaggcgcctatgatttggactggatttacgggatctcttttctgcgtagagtggcgttgtacgtcaagtgattgcctttacagcgatgctgtcacaagttcgaacatcgtttttttatagggagttgttgccgtctgcgggactaactcacacaaggtagcaccctaagtatcaatacgtatttatatacagtgagttccatctcgttttcattcttttttttgattgcagctcacagatcgacaaatatttacagtgtattctattaatacaatgggtttcatagaattttcattcctttgcagcacacaaagcgatcaattacgacgatgcgtcttcaccaagcagtctggttgtatgcttccctccacggcaacgattatgcgcgagcgtacgctaaggagcgactacaactgtcagaggatgctcgtcgtgtccgcgattcgaagtggctacttaacaaagggggtgtccgtcttcgtgagcagtggcgtgcgcttccttctccaaaacggcgacggcttcttcaggagacacctgacctgtcgtttccagaaggggttgatggaatactagatgaaaggcgtcgagttccagacccccgctgcagagctcccaccaagcttacaagatgcaaatcaagtgatcgctacacatgagctcgaacctacgaccgcgacccccgctgcagagctcccgccaagcttacaagaggcaaatgaagtgatcgctacacatgaactcgaacctacgaccgccaccctcgtcacagaacctacctcgacagaagagcggtcgtctcctgcgattcaactctcgccgtcagtcttggagtccgcacgggagttgtctgctactgatatgacatcgccagatgtggccgacaaagtagttcgcatggcgaatgcacgcagcaattaccaccaaatactgtgcgaagagcatcgattgcgtgtccgcgctgaatacaaccgcggaagcctcgcaggggtgctcgagtcagcggcatctagtgtcattagcgctgtggctctagctaaggctgattgcccaacaacgagtgacgaggcttttgctgcagtttgtacacgacttacgtgtgttctaggaacgatgttgggaacagctcaattcgatccagatcctgacgatgaccaaccatcccgagccttttctgaatctcgaatccaggcagcgcgccggaaatacgatgtaagcgtgcgggaagtgcaggcagcatgtgatgaagagcacgtaggggctgcctgcaagctcttcccagccgcacaccgcaacagatactttgggaatttgttagcactgatgcagttggtatatttgaattgcggaaaccattaacaatggaatgaatgaacttgcatatattttgctaattagcaaggtggattctgaaaaaaacgatggtgcaaggcttattcgataagtacatcttgcaccgtcatagcggaagctgcattcgccggccgtccgcgtttcttcgatgtacccgagacttgatgttgttttgacgccttctaccttggctgtttctgcgtgcttgacctcttcttcttggcaaccaccttcttctgtttcgagcttccccttttcttcttttttgattctgcaattcggttcttcagctgttgcaacgggtctcgagcggttgacgtaatgtgaagctttctgagagcagctacgacatgagcacatccgcattttgttgaagtacgcgcattcgcatcgttggcgatctagatccaccaaccacccgatgtgcggcatcttcgtacgatgggcacgacgtaaagaccaatttgtgaccttaatgtagagatccgttgctttctcacgctcttcttcttccgcttcttcacatagttcatcagagtggtcacacaatgtatctcttgttgcgctagcatcagacgcggtagactcggaatccgaaccacgatccattcggtcgtgctgaccagacgtcaagctgagaaacagtgagagtctgctccctggagtctcaacattttctgaagtagaaatacgcgaagaactacagtcaccagctgattcatcaaacactgccaagaacacttgatcctctgtatcaccgctttcagtgacatcagctaccccgaattccaacaccctaacgcgtttttcgtctcgtgtcgcgttgattaatagccgagatgtttccagaaagccgctgctgccttcgacaagtccgttgtaggctgaggaatgaagtctgccggaaccgggtgtagaggagtgatggactcaacaaaatcacaaatttttaatagcagtctacgcatgtcgtagcgacgccgctgaagaaagtgttttagacctccgttgagattttcgcacgggttggtggtggtggcatacccctccggagtatgaaagacctgccacctccagtatctccctttcagccactgctgatcaaaatactctgcgaactccgtcagatgcgtggtttctttccactcagcaaggctgacatcccgacagtactcgtactccgttaggctgcgcgaaaagtgcatatccatgatcgcaatcatcaacttcttccgatcatcaagcggcaggtgctgtgtacgtttccgtacattgtacaggacatgaaaaaaacacatcaacttcgtggcgtgctggaaggttggtacattttgtagtgcgagaaactgagaatcctccgcatcgctcattgtaaaatcacagcgaatagaaatccctcgaagactgcgcactaactccacaaaagccctgaagcactccgtgtactcatgctcggcgcggcgactcaccacgaagaaagctccgacttggtatctcctggcttggtcggtgaacccgcaggttatcacggggtacccaatatcactcagcttaaaggttgcgtcagcatggaacaggacacgagcatcacccgtactgaagcgaatacaactgtcgaatattgctagtgaagtcacgccgacaataaacgggtcattgtcatctcccgagccaacgtaagtcatgccatcgacgttcagttttgcaccaaacacaaatgccgtttctggtgggttctcgggtttgtagcagcgcgatcgggccagtctgtgaattgcttggatagagttcttgggcccttgttcttttcggatacgttttagggcgttctgaacctgagaaagcgtaggccaccctccccgcgacggtcggatgttgacctgtttcttcagatggacctcgataacccggggtgacagtccaacctcatcttgggtagcgtagcgataaacgctttcatagggcgagtgacgaggggagtgtgttgttcgctgcacgtgagcactcctctcgcgtggccgttcaagttcacaagtacacgccacttatcttgccccttgcactggaataccttccacacaattccacacttgccaaaccttatacaggttttgcttgagcacttcagtcgacgctctatcatcgtgtgctttccgccacagatgcggcagaaatcgaagtccactttgtgaaaaacggcggtacaacacatgagctggtcacggtagctatcatagtcatccgcgctgtcaagaagagagagctgtatccacgtagacatcctcgcaacaagaagaaagtagaagccagtgagtttgcagtataagcgtttgagttagttgtgtatgcacaaccgatcgctgcggtgtcctagcaatccagtcactcggataagaagccgagtcaattcagccgccccgcaattttgccgtccggctaagaggccggggtaaatccgccggccggccgttatacttcgaaccatcttattatactctagacagggttatatatttcatcccccacaatatggttgctccccagagttgtatattttgcaccacaaatctgtatagttacgcacgctcctcgtaggaaccaacatggacatcaactgctccggatggggtcatgagtcgtgactgtggccaagggtcgtccttcatgtcaatgacggtcaagcgtctacaccacctgcccttccggatccttgcaaacctacacacctctccctcaaatgtgcacactacgcagtagatatccacgtctaaccaaccagccaacaccagtccgttcgatccagcgcagcatctgtatgacggtcgcgaccctggtgactgcatgcaccggcccacaggatcacatccatcctggtaatcgcgagcccaggcgcagcagggcgaccgaccgacccgacggatggccggcgttggcgtccgtgtcacttggcagccagctggtcggcgcttgctttcttgccagctggccaaagctagccttgcctccggtagcctcatgactagctgagtgacagaccgactcgctcagttcattctccaatctactccctcccatcgaagcaacccgctcgatctccgccagagccagcgctctcccaaacgttctatcggaccaagtctctcctactacttctacttactcaacccaaacagccatgttcagcctcagcaccagcagcaagatcttcgctctgtgcattgccgccaccgccgtgtcgaccggtgcccacgccgagacagaggcggaccagaccttgggtttgctcggactccccggcgtcggctatggcgcacccggctacggatacggcgccggccccgcgctcagtgtcggtgtgcctggactcgcgagtgtcggcgtcggtgtgggcaacggcggtgttggtgtcggtgccaacgtgctgggcctcggagcgcacgtcggtgtgggcttgcccggtgtcggctatcctgcgggctatcctgcgaacggcgtcccgccgaccggtgtctacaacgctccgccgcctattgtcaacggcgcccccgcctacaacaacgctccggctactgttgtgaacagcgcccctgctacgacggggcgccaatggcgcgtctactgcgaacgcgaacgccaatgcgaatgcgaacggcggcaacagcccctactcgaccaagacggtctccgtcacgaacggagacggcacgtcgaacacggcgtccgtgtcgaacggaaatggtgccgccgcgacgggtggtgcatcagcgagtgctacggccagcgccagtgcgagtgcgtctgctcgggtcacggctggagtgggggccacgtcgtctcagaagacgtactgccagcttcgctcggtggaatgagcgaggcaagtgtaccctcttaggggagctcgtcgaggtgccgtgagcacctcttggtgaacgaacgggctttgtgtcgcgcgcgcggtttcgagtcgtcttgctgtgattttctcctcgtagcgtatgatggatgttgtccttttggtcgtttgagtaaggagtttcaatgcaatgcaatgcaatgaattcgaaggtttgtgtgagactttgcgcattcgagtgcgtgttgtaacagcacagttgttggcctgtggttttgtatatacgcacccggcagcaggcagagaaacagaaaaaagcaaacacctctggacagtatgcttctcgttgcgctcgcttgtcgctagtgttagatcataccaaagtcaaggcagcaattcgatccgatactttgggatttcctggtctccgattggttgagtgcaacttcaacaaagaacatacaaatactagtatgaagcagatcattcaaaatcaaagtagaatcgccaaggccgggccaacacgagccgagccgagccgagcagagtacagccgagcagagtaaagcagagcagagccaagtagcctttgaggttgcagtatgtagtagcatcaaccgtgtacgcaggttatcatcgttcagcgtgccgcgccttcgccacgtgtcgtccacatcaagaagcttgccaaggcctcgacactacagttccatcaccattggtgattcaccaagctgagccgtggaatgcgaataagaacgggtagagagtaggaaccgacaaaaggtccccgccatacagaaattcgggcaaaacatacagaggtgcgcatccaaaacatacatacaaaaactgcacaaacgccacatgtttggattagcacacggcgtcgatcttgccaagaagccgcattcgcaatcttgccaagcagcagaattctcgtaactccgccgtggggcagaattactttttcacgcttgtactgcatagcaaggcaaagtccgtgtcgaactatgcacnnnnnnnnnnnnnnnnnnnnnnnnnnnnnnnnnnnnnnnnnnnnnnnnnnnnnnnnnnnnnnnnnnnnnnnnnnnnnnnnnnnnnnnnnnnnnnnnnnnnnnnnnnnnnnnnnnnnnnnnnnnnnnnnnnnnnnnnnnnnnnnnnnnnnnnnnnnnnnnnnnnnnnnnnnnnnnnnnnnnnnnnnnnnnnnnnnnnnnnnnnnnnnnnnnnnnnnnnnnnnnnnnnnnnnnnnnnnnnnnnnnnnnnnnnnnnnnnnnnnnnnnnnnnnnnnnnnnnnnnnnnnnnnnnnnnnnnnnnnnnnnnnnnnnnnnnnnnnnnnnnnnnnnnnnnnnnnnnnnnnnnnnnnnnnnnnnnnnnnnnnnnnnnnnnnnnnnnnnnnnnnnnnnnnnnnnnnnnnnnnnnnnnnnnnnnnnnnnnnnnnnnnnnnnnnnnnnnnnnnnnnnnnnnnnnnnnnnnnnnnnnnnnnnnnnnnnnnnnnnnnnnnnnnnnnnnnnnnnnnnnnnnnnnnnnnnnnnnnnnnnnnnnnnnnnnnnnnnnnnnnnnnnnnnnnnnnnnnnnnnnnnnnnnnnnnnnnnnnnnnnnnnnnnnnnnnnnnnnnnnnnnnnnnnnnnnnnnnnnnnnnnnnnnnnnnnnnnnnnnnnnnnnnnnnnnnnnnnnnnnnnnnnnnnnnnnnnnnnnnnnnnnnnnnnnnnnnnnnnnnnnnnnnnnnnnnnnnnnnnnnnnnnngggtgtagaggagtgatggactcaacaaaatcacaaatttttaatagcagtctacgcatgtcgtagcgacgccgctgaagaaagtgttttagacctccgttgagattttcgcacgggttggtggtggtggcatacccctccggagtatgaaagacctgccacctccagtatctccctttcagccactgctgatcaaaatactctgcgaactccgtcagatgcgtggtttctttccactcagcaaggctgacatcccgacagtactcgtactccgttaggctgcgcgaaaagtgcatatccatgatcgcaatcatcaacttcttccgatcatcaagcggcaggtgctgtgtacgtttccgtacattgtacaggacatgaaaaaaacacatcaacttcgtggcgtgctggaaggttggtacattttgtagtgcgagaaactgagaatcctccgcatcgctcattgtaaaatcacagcgaatagaaatccctcgaagactgcgcactaactccacaaaagccctgaagcactccgtgtactcatgctcggcgcggcgactcaccacgaagaaagctccgacttggtatctcctggcttggtcggtgaacccgcaggttatcacggggtacccaatatcactcagcttaaaggttgcgtcagcatggaacaggacacgagcatcacccgtactgaagcgaatacaactgtcgaatattgctagtgaagtcacgccgacaataaacgggtcattgtcatctcccgagccaacgtaagtcatgccatcgacgttcagttttgcaccaaacacaaatgccgtttctggtgggttctcgggtttgtagcagcgcgatcgggccagtctgtgaattgcttggatagagttcttgggcccttgttcttttcggatacgttttagggcgttctgaacctgagaaagcgtaggccaccctccccgcgacggtcggatgttgacctgtttcttcagatggacctcgataacccggggtgacagtccaacctcatcttgggtagcgataaacgctttcatagggcgagtgacgaggggagtgtgttgttcgctgcacgtgagcactcctctcgcgtggccgttcaagttcacaagtacacgccacttatcttgccccttgcactggaataccttccacacaattccacacttgccaaaccttatacaggttttgcttgagcacttcagtcgacgctctatcatcgtgtgctttccgccacagatgcggcagaaatcgaagtccactttgtgaaaaacggcggtacaacacatgagctggtcacggtagctatcatagtcatccgcgctgtcaagaagagagagctgtatccacgtagacatcctcgcaacaacaagaaagtagaagccagtgagtttgcagtataagcgtttgagttagttgtgtatgcacaaccgatcgctgcggtgtcctagcaatccagtcactcggataagaagccgagtcaattcagccgccccgcaattttgccgtccggctaagaggccggggtaaatccgccggccggccgttatacttcgaaccatcttattatactctagacagggttatatatttcatcccccacaatatggttgctccccagagttgtatattttgcaccacaaatctgtatagttacgcacgctcctcgtaggaaccaacatgaacatcaactgctccggatggggtcatgagtcgtgactgtggccaagggtcgtccttcatgtcaatgacggtcaagcgtctacaccacctgcccttccggatccttgcaaacctacacacctctccctcaaatgtgcacactacgcagtagatatccacgtctaaccaaccagccaacaccagtccgttcgatccagcgcagcatctgtatgacggtcgcgaccctggtgactgcatgcaccggcccacaggatcacatccatcctggtaatcgcgagcccaggcgcagcagggcgaccgaccgacccgacggatggccggcgttggcgtccgtgtcacttggcagccagctggtcggcgcttgctttcttgccagctggccaaagctagccttgcctccggtagcctcatgactagctgagtgacagaccgactcgctcagttcattctccaatctactccctcccatcgaagcaacccgctcgatctccgccagagccagcgctctcccaaacgttctatcggaccaagtctctcctactacttctacttactcaacccaaacagccatgttcagcctcagcaccagcagcaagatcttcgctctgtgcattgccgccaccgccgtgtcgaccggtgcccacgccgagacagaggcggaccagaccttgggtttgctcggactccccggcgtcggctatggcgcacccggctacggatacggcgccggccccgcgctcagtgtcggtgtgcctggcctcgcgagtgtcggcgtcggtgtgggcaacggcggtgttggtgtcggtgccaacgtgctgggcctcggagcgcacgtcggtgtgggcttgcctatcctgcgggctatcctgcgaacggcgtcccgccgaccggtgtctacaacgctccgccgcctattgtcaacggcgcccccgcctacaacaacgctccggctactgttgtgaacagcgcccctgctacgacggctacgactagtggcgccaatggcgcgtctactgcgaacgcgaacgccaatgcgaacggcggcaacagcccctactcgaccaagacggtctccgtcacgaacggagacggcacgtcgaacacggcgtccgtgtcgaacggaaatggtgccaccgcgacgggtggtgcatcagcgagtgctacggccagcgccagtgcgagtgcgtctgctcgggccacggctggagcgagcgccacgtcggcgcagaagacgtaccgccagcttcgctcggtggaatatgtgtatcctcgtcggaagcctggttgaggtgtggtttggaactctgtgtcgatcctccgtggtgtcggcctcctagtgtatcatgtttgattttttgtcgtgtcgagtaaggagctttaatcccacccaatccaatgcaattgagcttttgtctgagactacatgtagctatctcgagtgttgtgggcgcatggacacacccgacaggtaggcattgctggtcttgacaagatgatcccttatgtggtggcatgctgccgtgatgctcgtggcgcgcgtcgttagtgtcgtgccagcagtaggagcgacaactcgacccatgcttgggatctccttatctccgattggtctcacacaacttcaacaacgagcatacaaacatcagtataacgcatgttatacaaacttgaagtcaagccatttgttcagtcgggttcagtcgggccgagcaagctcgcccgtatttgcgcatgcaccaacccccgtagcccagcccagccaaaacaagccaagccaagctttacggaggttatgttatcgtacagctagctttcaccacgtggtgcccagcatcaccccggcatacgccttgactaagcgaagcttcagcgctacagttatcatcgagctgagtcgcagcaatgcgaataagaacgcgtagagagtacggatcaacatgaacatcaactactccggatggggtcatgcctgcgggccaagggtcgttcttggagtcaatgacggtcaagtacatacaccacatgccttacgacccttccggatctttgtcagctcctccctcaagccttcaagtgtattgtacactacgcagtaggaggtatcgacgtctagccagccatcaccaggtcgttcaatccagcgctatgcaccagcatctgcacgacggtcgcggccgtgatgaccccatcggccgaccacctcacagggccaccttcgccatggtaatcgctagccccgcgatatgctgacgccgcgaaacccgtcggctggttggcgttgacgtccgtgtcacttggcagccagctgatcgacgcttgctttcttgccagctggccaaagctagccttgcctccggtagcctcgcgactagctggctggccgcctcgcatcagttcattctccaatcaaccccctcccatcgatgcaacccgctcgatctccgccagagccagcgctctcccgaacgttctatcggaccaagtctctcctactacttctacttactcaacccaaacagccatgttcagcctcagcaccagcagcaagatcttcgctctgtgcattgccgccaccgccgtgtcgaccggtgcccacgccggaccagaccttgggtttgctcggactccccggcgtcggctatggcgcacccggctacggatacggcgccggccccgcgctcagtgtcggtgtgcctggcctcgcgagtgtcggcgtcggtgtgggcaacggcggtgttggtgtcggtgccaacgtgctgggcctcggagcgcacgtcggtgtgggcttgcctatcctgcgggctatcctgcgaacggcgtcccgccgaccggtgtctacaacgctccgccgcctattgtcaacggcgcccccgcctacaacaacgctccggctactgttgtgaacagcgcccctgctacgacggctacgactagtggcgccaatggcgcgtctactgcgaacgcgaacgccaatgcgaacggcggcaacagcccctactcgaccaagacggtctccgtcacgaacggagacggcacgtcgaacacggcgtccgtgtcgaacggaaatggtgccaccgtgacgggtggtgcatcagcgagtgctacggccagcgccagtgcgagtgcgtctgctcgggccacggctggagcgagcaccacgtcgtctcagaagacgtaccgccagcttcgctcagtggaataagtacactcgtgtgtgttcggaggtcctctatttacgtttgtttaacccctatagagtcctgatatggctgtagactgagcctaattgaaaaacggtgttggtataattcctcctccggcgaaaattgttcttgcaagtgtttccatagcttgacaggcaggtgctcttgaagtagtacagcattggtaaactcagatagttgtcggaatttgagaaatcccctgatcgctttgtaggtgcgtttggaagctggtttccatgctatcgagacaacgtctttgagcgcttggtgcgtggcattctgtcgagccaatggacagtatgtacactcccgcgatacttgttgcgcccgtcagtcgttagtgtcgtatcatacatgaggtagtagcaacttgatccggagcttctcatctcctattggtcgaatgcaacttcaacaaagagcatacaaacgctagtatcaatcacgtgacaaggaaaggaaacaagccatttgccacatggttagacggtcagggcgagccgagccgatcggagccactgagctagctgtatatagcatcaaccttgacgcaggttatcatcgttcagtgtgtggtgccttcgacacgcggtggcccagtatcacggcggcagtcagcttaggtagcttgactaggcctcggtactgccgttccatcagcaagctgagtcgcggaatgcgaattccgaggtacctcgaagcaaaacaaatagagtagcggttaacatgcacatcaactgctccggatggagccgtggcttcagccaggatcgaggtgggtgtaacattcgctcctggtgtggctcgatcgcatgcatttacctcacaattagcgctcggtattaattcacctcgacactctaccattttcattctatgagtcggatattgcagcgataagcttgtcgttcttttatggatccgccgaaccagtattcatcttgcagtgcatcaggtcgtactagtggcgtagcgcttgagaaggagatcctgtagcctccactcttgccacgcagtcatttctcctctccccccaggaacactggtaaactgtttatcatgcggaagcagacagcttgtttcgggcttccacactgctgagaacggcccgtacgcaacgctcacgaggtgcgcgtcgccgatttgagcgcatgagaagcgccactcgctagccccatgtccatccaggaggagctcccaatggtcttcccggctcgaatccacccggacaaactcagctcgcagcagcgaaaagcccagaccgatgcccaccgccttgatgtacgcctccttcagcgaccaaagtcgatagaatcgagtgtattggtcatcttcgtcgtcggtctcttgaatgtatccccattctccagggttaaagtagtctgcaaaagctcggaagaactcctctaagccgcacgacgtccacgcccactaaagcgcgggaatcactggcaattgccacaatagtgccatggtgcgagacgttgtagttccatgatggaggggcagccccctccgccggtcgcttccaatacggcttattctgccaggacgcaacactacactcgtgagtcgtaaaaacgtagtttgagcagtcgatgccattccggggaggacgggtcccatgcgacgacgtcgacgaagtggagactgcacagaggtgtcgccatcttagagtaaacggcaatgtaatgattggatgagatcgcacgacgcgtaaagattcaatgagcttccctgtattcgcaatatctcaataaataagcatctcgcatggttccatgtactgttgtgcgaactgaaggccgttacgtgtcggctgtgcgaaggcgacaaggttcttggccacgcacatgccgtagatcgatttttctcgcacgacgtcaaccattcgggtggcaatgcttttcctgcgtaccgaagggtgcacccagagctggcagataccaacaagagcaggctgcgaggttgcagacgccgtgatcgcgccctccacgcttcctgagctctctttgtcgtcagagtttgtctggacaactagattcgaggcgctcttgtccaaggtaaaggcttccgttatgcgctccgtgttgacgcacccaaccactttgtgcttttgaatgtacacaaagtggctgcgtcgcaagaacgcttcttcttcaacaaagcccaatgcgtcatccagcacggccttgacctccagcagcttcttcacgtgggaggtcgggtcgtctcctcggatttccagaatcctcgcccccgtgtcggggaagctcctcaacatcctctccgtcttccacttggagaatgtaatgcctcgcttcatccgcttgcagaacttctggtgctccttctcgtcctcttcctctccggcagtgtacagcagcccgcaagtggggcacgtgacatgcttgccgaagctgcgctgacccacgtcaatgtaagactgcgtagaagggagggatttgcttggagacagcaacgcgttggtacatttcgaggacgcagcggcagtctttggctccggcgtgatcgtcgacttggtggccttagtgtggactgcaggcgagagccacaaggccattgaggagctcctcttcttgcccacgtcattgtcgctggaacttttgctgctgcgcttgcgctttgcggcggaattcgccccttgaccgccacccttgccgcgacgcatgagggcgtcgttcacgctcgccatcgccgtcggagggaaattgcgcgcgactgcaatgtcagcgcgggaatctggttcatccacgcaacaactgtcacgggcggctcagatgcgaagtgtacccatatggttttatcactctcatccacgtagcttgcagtatagcatgttagtccacatattaggttctactagtatcgttatatgaaagcatgaacgtaaggtaaaccgaacaatactcaggatatagctcgtgcatttagcaatataaagaggtactactgaacggcatgtactgatactccatttacgatctctaacgggtggtgtagcgctctcctggagtgttgactgcatccaatcccggatcgccggacacgttgatcggctcactttggaattcgcgtctagaagcccaagcaccgccttcaccccctctcttcttccaacaatggcttcgctcggagactaccgtgtggcggacatctcgctggctgacttcggccgcaaggagatcgagatcgcgcagatcgagatgcccggcctcatgcagagccgcaaggagtacggcccctcgcagccgctcaagggcgcccgtgtggccggctcgctgcacatgaccatccagacggccgtgctgatcgagaccctcaaggccctgggcggtgacatccggtggtgctcgtgcaacatcttctcgacccaggaccacgccgccgccgctatcgctcgcgacaactcggccgccgtgttcgcctggaagggcgagaccctcgaggagtactgggagtgcaccctgaacgccatcacgtggccctcggacgacggcaagggcgacggcccggacatcatcgtggacgacggcggtgacatgaccctgctgatccacgagggcttcaaggccgagaaggccttcgccgagaacggcgccgtgcccgacccggagtcgacggacaacgccgagatgaagtgcgtgctcaacatcatcgcgcgcacgctcaagacgaaccccaagaagtggacgcagatcgcccagcgctgcaagggcgtctcggaggagacgaccacgggcgtgcaccgcctctaccagatggagaagaacggctcgctgctgttccccgccatcaacgtcaacgactcggtcaccaagtccaagttcgacaacctgtacggctgccgccactcgctgcccgatggcatcatgcgcgccacggacgtcatgcttgctggcaagcgcgtcgtcatctgcggcttcggtgacgtcggcaagggttgcgcccaggccatgaaggccgccggctccgtcgtgtacgtcacggaggtggaccccatctgcgccctgcaggcctgcatggagggcttccaggtcgtgtgtctcgagaccgttgtgtccgaggccgacatcttcatcaccacgacgggcaacaaggacatcatcatggccacggacatggtcaagatgaagaacaacgccatcgtgggcaacatcggccacttcgacaacgagatcgacatggccggtgtgaccaagatcgccaagcgccagaacatcaagccgcaggtggaccgcttcatcttcgaggacggccacgctgtcatcatcctggccgagggccgcctgctcaacctgggctgcgccactggccacccgtcgttcgtcatgtccaactcgttcacgaaccagaccctggctcagatcgagctctggacggagcgcgactcgggcaagtacgctaccggcaaggtctacgtgctgcccaaggagctcgacgagaaggtcgctcgcctgcacctggacaacctgggcgcccagctcaccgtgctctcggacgagcaggccgagtacatcggcgtcaagcccacgggccccttcaagccggagacctaccgctactaagcggcaggtttctgtctgccccgtttcgactagaccccagtcttccgtgcggaggctgttggagtcccggcagagatagggcccccgctctttcattgtgctgagaagcatcttcctgctgctttgcccaccacaatgctctgttcaacccacgtagccaacgtagcaccaaagaagatatccagaaactaatgttaagcatccgcaaaccaattggtaagcgttcctcaatctcctccttcattaacttctcattagctggctcatttcttcaaataaagatgacgatgagcagcgccgccgccagcaagaagatgatcacgtagtagcagccgagcttgcggtgtgcgctcaccaccttacgagccgccttggtttgttgctgcacgacctgctctgcgtcactgacctgaacgctcacatggtccagcatggcattctgcgaaatgacctcctcgtttgtggcttcagctgcttggtgaagtcgcttggcgcccgagtagatgacatcgagttgtcgttcctatcgtcaaacgatctcgtttagcgaactctacaacgagctcatctacgccgacactacacggacctggttttgcgtggccttatccatccgctcttgcagcttgggcgtcgacacctcctcgaattcgcccgttggctgcgggtctctcagcgtgccatcttccatcattgccagtgtgatacctcagtgctttcggcgtatgccaaagaattcacaccacgcattctccgccacgtcccaaggacagaaatatacgatgcacatcaaggtaaaaaataaagcaggcagactcaggattttgaagaatgcaatgtctatttttccatggtgcgccacgcacctcgcggcgtggctacgctgttgaatgactacaatggtgctatctagttgtcgttggtggcgttcatatatttcttgagcggggcgacgggcagcggcgtagccagcaggtcgtcgagatcctcactctccatggtgaacgccgtcttcgcctggcggaagaggtgtcgcggccgaggaagaagcaccaaggctgtgactttgcccttaaaaagcttgatgttgcgcagtgactgccggctcagactgtcccacacatgcacgacgccgttctcgtctccagatacaaggaacgcaccgctggcgtgaatctgcaacgtggtcacgctcgtttcgtgtccttcaaacgaacccggcagcaaagcctccggaccccacggcgaaacattggcaccagaagtcgggcccgtcgatgcgttggcaacacgagccgtagcggcagtagccgcagtcgctgctgcgttcaggtccaaagcatagacccggccattgccgcatcccatgaagagccgctgctccatggggtcagagacgcatgcgttgacgtaagacgggcacgacacactgtacaggcactgcgacgagctcaacgaccagatcttgcaggtacggtccagcgacgacgtgtagatgcgcgcgttgacgccgccgagacccacgtgcagcgaggtcacgggcagcacgtggtctgtgaagctcaccacgggcgtcacgccctgctggaagctcgacgcagcgtccggttcgtccagcaagtccacgagtctccacgcgtgcaccagtgcgtcttctccagccgtgatcaagtgcgagtcgtccgacgtgagcgccagcgccgacacgcgcttgtagtgggcgtcgaacaccgtcaccagctcgcccgtcttgacgtcccacacgtagaccttgcccgactccgctccagcgaacaggaagttgccgcaggtcgaggacgtcacgggccccatcttctcagccacgtggcacttccacacgggcatgtccttgccccagttccagaggttgagcgccagcttgccctcctgcacagccaccaagtggtcggtgcggggcaccgcgtgcacgccattgagcgccgagcggcagttcttgaagcagtacaattggccgccggtggaggcgtcggccaccagcagctcgttctcctggctcgagcccagcagcagcacgtggtccgccagcgccgtggtcgccatgcttatcggagctcttcgatgtaggaatgatgtccgagcagtgacgtccaataccttccgagtctgtgattggtggaaagagaaccgaaaatcggttttctgtgctctgattcgttgaaaaggaatttcaagcgcaacttgggtcattatcgaaggtgcagctgggtggtgaccatggggcgcgaaggaggaggcgacaagcgcaagaagcagtggatgggcggccgcgacggcaacaacaagcgtcacaagggcgcgctgggcgctgctgccactgctaagggccacggtgccgtgctggtcacgtgtgacaagaccaaggagcgccagagcgtgagcgacgccctcaacatcctgaacgaggcggccgacaagttcttccccgtggcggaggaggacaagaaggagacggacgaggccgcgaaggaggagggaggagactcggtgcagaagaagctgcaggaggagattgcggcgctgcagacgcaggccaagagccgccagacgggcaggttcacgccgctggacacgggcgtcaagggcgccattctcatccagttcaaggacgacaccatttcccccacggcgctgctgtccaagatcttcgagcaggtggagagcaccaaggacttcgcctccaggttcatcatgagaatgaccccgctggagaaggtgggctactcgagtgtggaagccatcaaggagttggctgctccgatgattaagacccacctggaggcgttcaaggaggagcagaaggccgcgggcacggacgaaccgctcgagttcgcggtggagtttaagcgccggaactgcaccaacctcaacagcatggacgtcattaacggactcgtggagctggtgggcgaagacaagaccaaggtaaacctgacgacgcctcgctcagtcttgctcattgaggtgttccgcaacacgtgcgggttcagcattctcacggacttccaccgcttcaagaagtacaacgtgcgctcggtcatcgacccgcccgtcccaggccagcagacggctaagaagagcgacaaagatggcaaggccgacacgaagggtggcaagacggacacgaaggatgccgcagagaaggatgcatcgaccgaggcggaagacaagaaggaagagaagaaagctgagaccgctgaagacaagtctagcgaaggcgatgcaaccaaggaatagaaggatacactgtagttgttaacgcaatagaaatcctttcattgatcacttctattacatgcggcgactacactacctacagatactttggatgaagaatcacgcctagtgttgtcttcacaaagcagctcaaagctgcttcagaaaatgtagataagatttggagatcatcatcttcgtcatccaattcaaacatacaaccgctcatgtaaacatgcatacatacaccacccgctgctacaaaggccgagtgcactgagctgtcttgagaacggatccgtgtgttgttttccatgctcacgctttggttcggagaatgtagataaattggttggatcgtcatctccgttctcgcaacacgctcagcacactctccacgcctcgtagctgcgcacccaatgctcctgtatatcctgtcttttgcctgcagtttcgcgtgattccccgtcgtcccgcacccctgtcatccacacacaatagaagtcccgacgcgatcgatcgatgcaaacgaaagagagagaggaacagccattccccctctgctttactgcattttcggttttccaagcgaagacgcgacgcctcggaacacgacgatgcagaaacctgttcccgcgtgctcgtccgcaccgcgccccaatcaaccacgaccgaccctaactcgccactcgtccacccgagctccggctcagccaacagaagaaggaaaaggaaggaaaagcgctccattttcttccacccccggccaaaaccgagcactggcgttcactggaagagcagcccgcaggaaggagaaactctccgtcgactagtgtccatggcgcttaatttactcttcctgtatcagtccaacaagagcagcgaaatatgagccacctgattcatatcctaatggttgttgctgctgttgaagccgcacgaaccttgtccttgttcttgcggttgcggtgcttcttgtcgaacttcttggcccagtgctggttgcgcaggaacttggggtccagctgtaataaaggcaagaagaaggcgtcagtctgctgccctgtgtgtctgtatcatttttggcagcggggacgtacgccgcgcgtggagtggaagcggtggttcttcggcttcttgataccgttgcggtgagccttcaccgtgttgttacgggcggtgtggtttttctgcttgaccattttggcgtcggattggcttggttttcctactgtggcggcgctttcgtctcgctggagggtctatcgcagcactcaaggggcggctcaaacgctagccaccagtcgattcgcgcaaatgtgcgccacactagttcccacagcgtcctaagctagcgttgtgtagaccacgctattttcgttaaacctcaatttgaagcgctgataaaacctcgcggccacgtggtgtaccgcacaccaggctctgacttggcctgagtatgccccgtcgtttcagcagcacggaggggggagccaaagccaaaatcccgaccgagcgcgaccgaacggccgcatcctcgccgagagcacctcgctagagcagacacagagacagcatggacccgttcggagacagccagccggtcgagggcgaagtgcccgccgagatctcagacttcgcgccgcccgcggacaacactggagagtacgtgaagcaggaagatcgaaaaaacatattattttattccagatctggatgaagtactaatagaactgttgctgctgtggcagcttctacgaggtggagcccacggaggccgccacgaatggcacgttcgagggcctgggctaccagcagcaggagtaccaggagcacgcgtacgaggagcagacggagagctaccagcccatggagttcgctgcccaggagcagcccgttgagacgcccgctgtcgacttccagatccccgtcgtggaggaggacaacgagctcacgtatgtggctgaacagagatgcagttggaaagatatccagggttttctgaccgtgttgtttcttttgctgtgcagtaagtttatgcgcgagtacgaggagaagattgcgctgaaggcgcaggagcaggagaaggtggccgtggagtgcaaggccaaggccgaggaggacatggcgcagttcgtggccgagcgccagcgcatcaaggagtccaagatgcagtctaaccgcgtgttcgagcaggccacgctcgagaaaatggtggctgacctgcagaacgagaacccgtgggagcgcgtggtgacgctcgtggacctggagacgagccgcaaaaagaagctggacgcgctcaacaacaagaaggactccaagaagcaggaccctaagcccgtggctgtgcccgctaagaagacgcccgaggacgaggaggacgtctctcggatgcgacagttgttcgtgcagctcaaggccacgccgctcgagcagacgcgtgctgacgctgtggctgccaattagaccaaccacagacagagatcagccccgcacgctgcggtggtgatagtagagaaggcggtagcgcctgaaacaggctatctagctgtgtggagctgggcgcagcaatgtagagggcgggtggtgccgtgcgcccgtttgatctctgcagatacttttttctaacctatgacacgtgttcgccacgcacttgaccgggtgccctttgtagtgtgtttactgcagtgcagtctcctttgatgttgtgaggagggtgatctggatacgcagttcatgcagtctgctgagtacggcatttcggcacgcaagtgttgcacgtcgaccacagagcactgattcgacatgaaagcaggcgggcccatgttcctctcgcaccgaataaagacggtctctgacgggaagaccaagcccgtcttctgtgaggtgccagtgtaccatgcatctacttttgagcatcctactactacagctattgatagtttttggttgggtatgtcggctcgcaattgttgcacaccggccatggaggagtggggcgcggcgtgaaagcaggcgagccaatttggctttcgcaccagaaaaaagaacagctcagacggagaaccaagtgaacttctgtgaggtgcagcagcgaccgcaggaggctgctgaagggggggtatcgaagttctccgcagtcttgaaaaaggagaatgagcaggttccgcgcgtccaacagccagcagcccaatcaattttaatgctggtttcaatatggcatactatgtttctgtacaacgtgtgtgtaccacatctaaacatgtgacttgttagaagaacgcttgcggccgccgcagtcgcgaccaagctcaagcagcagcagcgcgcaacggatgctgacagtgacggcggctcgaagcttactatagtatctcgcgcgtggccgcgtaagctgctgccgcttcggcatgcgcgatctggttgttgcaggaagcaagtcgttggacaaacgctggcggcgaggctcaagcgatctgagaactgacctgctgtgcgtagatgcctactatccctggtcactgcttttcgagcacatgcagttcaaagacgttaagcccgatgggggctcaacgaaccggaaatcgccatggaaatgccatcgacttcgattgatcgccacctagagacgagcattgacacccgtaatgtgctcactttggaagaagcttggaccacctagcttgggttaagctcttaaagactgagaagcacgccagcacttaaccagcttgggcgcgtgccaagcacgccatcccgatctgagttcgtccgtgttgcgatcttcgaccaccccacagtcgtggcaagcacattcgtcgaggccgcatcgatcggccttcatctccatgctcacttttgaattcgcaagctcgacaccccactcgactgaaccaactccaagcaatgaaactctcgacctccatcttcgcactcgtggccgccgttgtgtcgatggccgtgctccaagttccagcccagcaggctggaaccagcaccccggaagtgcacccttctctggcgtccaagcaatgctccaaggctggtggttgcgtgatggaagccacatcggtcgtgctggatgccaactggcgctggctgcaccaggtcggcgactacaagaactgctactcggggaaccagtgggacgccacgctgtgctcgactccggaagcttgcgccaagaattgcgctctcgaaggcgccgactatcaaggaacctacggcatcacgacgtctgctgacgagctgcagctgaagctggtgacgcagactcagtacggtgcgaacgtcggctctcgcgtgtacctcctcgacgccgcgggctccaagtacaagcaattcaagctgttgaaccaggagttcactctcgacgtggacgtatcgaagctgccctgcggactcaatggcgccctctacttcgtgcagatggacgctgacggaggcagcggtagcttcccgaccaacaaggctggcgcgaactacggcacgggctactgcgacgcgcagtgtccgcacgacatcaagttcatcaacggcgaggccaacacgctggaatggggtgccacgagccaaaactccggcggcggcaagtacggagcctgctgtgctgagctcgacatttgggaggccaacagcatgagcaacgccttcacgtcgcacccgtgcacgtcggacggactcaagcgctgctcgactccggaggaatgcggcaacggcaacgggaatcgctacaagggcgtctgcgataaggatggctgcgacttcaacccgttccgaatgggcaaccagaccttctacggccccggatcgcagttcaccatcgactccacccgcaagttcacgatcatcacgcagttcttgaccagcgacaacactgcaaccggcgacctggtggagatccgacgcttgttcaagcaggacgaccgcgtcgtgtcagtgcccaacagcgtctaccctgatctggcttcggccaactcgatcaccgacagcatgtgcgaggcgtccaagaagctcttcggtgatcagaacgaccatgccgccaagggtgggctggcgcgcatgggcaagcaaatggcgaacggtatgacgctcgccatgagcctctggtcggaccacgccgcctactgcctctggctcgacagcagctaccccgctgaagcggacccgtcaaagcccggcgtcaagcgcggcacgtgcccgacgtcgggtggccgtcctgctgatgtggaagcgcagcacccggatgccaccgtcaagttcatgaacatccgcgtcggcgacatcggctccacctactaggtgctagtgccggacacaaaggcagcttgcagtctcgaatgcctgatcagatttacctgccaggtttgtagtgtgaggtggttattcaagccatgctcacacacattggggtcttgcagtccattaccccagctggcatggacttcgtgaagagtcaactaggagttggggagaactatctgtagaagagaacaatccgtagaagagcagaaatctagaagtagacactgacaggcatgagcgctggggcaagcatgctatgattccccacttttgaatctactcggcgatcaacactttaggaattgccagcttccctatcacagtgttcaagttattttcttaagcggaacgcgttacaaagtcgactttagtgggattcgtttcactgaagaagatggagccaggacccagcaaggagaagatcccgatgaaggaacgagagtacgatggtgctcacccaatcttcacgccggtgctggcccctgaaatcacgtcgacctcgcaagccgcccttgtccagtggcgcaaggaacggaaggtctatgaagacatcatgagagagcactgccagacctcgggagaggactacgctgcggtgacgagatccgtgaaggattctttcgagcggaagctgctagagacatggtgtcggctccggtggcaagttgcagtgactgaagtcgatgacgacagactgcgtagcgagatcgacaacattatcaactccgtgaagaaccacactctgcccgacgtgcaagctctgttcaagaaagagttgcatttcaacctgaaggagagtgacgttagcgagcgagtgctgcaatatttcatctcctgcgagcgcataagtgaagaacacggcctgcatgcctgttttgagtcggaaaccaggcggaaagaaaaatgcagtttgctggtcaactcgattaccccggaaggattgaaggaggaggtgaaaaacgccttgcggtaccaatcgcctggagccaagacggatgagtgcaagttgcacgatgtgatactggccaaggcacttgagcaggaccgagactttcggcgatcaaagaagaagagggtctcggatgatgttcaaacgccacgtcagacacacgagcgcggcggaaagaaggccaagctcagagccgagtctggcgtgcacggacagcgaaaaaaccatgactcacgcaagaaagaaggtgctcctgcgcgaaatcaaccacgtccggaggcaaaaggaaaacctactgctaccgcaccgaagaaaggatgcctaaaatgcggaggacctcattggctttctaagtgccctgaagccagtgacgctgagaagcgagacttgccgaagcagttctacaagaacaaggacaaagcgtccagcgatgtgaacatgaagcgacttcgcgaggaaaactgaaataaggcgggcaccgttctgctgaatggtgtcctccgaaagccttactgcgcagatactgggtcgagtcggtgtctcatcaacgtcaagacgctagcagagctcaacgcagtaatggggaaagagatctcgataaggaaacgggaaaaaccgatcaagggccgtgcagttggggggcattgggtcgaggctgtgaaagctgtagacctggtcatccaaattggcacagccgctggcatcgttgaacaccagaaacctgtcgagtgtctgctaattgaagatgatgatgatgaatttatcgtgggtaaggacttgttgaagccattgggaattgatgtggacaggttgctggagcaacttgcacaacctcaagtcaacgacgactgtgatccatacgacagcgttgacgataaaagaactgagcatccagatctggcagagatcatggagcagttgatcaaattggttgacgatgcgataaaagcgggtttccccgtagcatatcggcatcagttggaagaattagtgaggaaacacgacatttggcgcatcgatctccggaatgaccctcctgcgagagtaccggcttacgagattcgattgaagaagggtgcaaagccgtacagatgtaagccaaggaaatactcaccagcccaaagcaagttcatgagagagttcaacgacaagcttgtgaagctgggttgggtataccggaaccaggccagtcgatgggcgtgtcctgcgctaccagtgagaaagccgggaacggaggattttcgacagacaagcgactacaagcctttgaacgctttgactgagcctatcgccggagtcatgccaaatctcgatgcaaagctgcaacatgccaggcacaagaagcactatggacttttcgatttcattaagggattttggcaactaccgctggctgagtcgagtcaagagatgctatcctacgcgaccgacgagggcgtcttcacaccaactcgagtacctcagggtagttgcgatgcggccttgcattttcaggctacaatggagaaatgctttgctgagctggtctacaagtctctgctgatctggattgatgatctgctcctgtttgcagacaccatcgaggaatatctggcggcactggagactttgtttgacactatggatcactatgggttgaagttcagtgtaatgaagacttgtttgtaccagcagtcagtgacctggtgcggcaaagtaatttcagagaacggcatcacgcatgatcccagacggatcaatgctctgtcgaacatgcctccaccgtccccggcaggtgaactacagcaatttatctgtgcatcaaattggatgcgcgatagtttgatcgactacgcccgaactatacagccactacagcaatgcttggatcgagcgctcgagggaaaacgaaagaccaagcgagtcgcggctggtattgcgctgcagctgaacgagtcggagctcgtgagtttcgacaatgtaaagaagctgttggcgaactcatcaacgctagcccatccgaaagacagcgcaaccttcgcattagtttgtgatgcatcggatgttggatggtcggccattttgactcaagtggagagctgggatgacgcaaagcctgtgactgagcaaaaccacgagcttttgatctgcaaaggagggacttttacaggcgcgcagctacactggtcggtcacggagaaagaactgtttcagcgtgtgacgacttgaactacctgttgctgcggcctgggggctttaaaatcttttgcgatcatcgcaatttgatttacatgtttgcaccacacccggaaacgaagaaacatgtacgagggaaattgcttcgatggtcactcaaattgacggagtatcgctacactatcgcacatatagagggtgagcagaacgtctgggctgatttagtttctcgctggggtggtgcgccgcctacatcagtgatgaggttcaagcgagtgacgcgcatgcagacgcaggcagaaaaacgaccattgttgagaccacttgacaacgactcgttcgtctggccaacactaaacgagattgccgccacgcaaaaagctcatctacaagacagaccagaggcctgcacgcaaggcgacgatggagtgtaccgatccgacggcaagatctgggtgccggaaggagcaagtggcttcatccagagactggttatcgtgtcacactgcggtcctcaaggtcatcgaggtgaggcagtgatgctaaaccatatcaagcgaatctttaaattcaaggagatggcgcaaagggctcggcggttcctgaagagctgcctgctctgccattatgtaaagggtggaggaaaagaaaatcccagttgatagctccattgcgaacgtccgagcgaaaacaaggttcccatggacgtgataccacgtccataccacgtccatgggaaccttgttttttcgcaatggagctatcaactgggattttctttttctaggggagagttttcggaacaagcaagcacctgctgattatcaaagacaacttcagccatttttgtgagctcataccttgcgatgcgccgaccggtccagcagctgcagaggcaatgatgtggtggcacagtcgctacggagtgcccaaaacatgggtcagtgacaacgctacgcatttcaagaaccaggtgttggctctacttagcaagttcatgaaggcgaagcaggagttcgtcgtggcatacagcccgtggttgaacggctctgtagagcgcgtgaaccgcgatgttttgcaggtgctgcgagcaatgatactagagtactcactctcataccaagactaggttcatctaatcccgctcgtccaagctaaactcaatcagtcaccggtgccgtcgctggcaggaagagctcctattgaagtcttcacggggctgccatgcccaagtccgatatcgaccattttcgtccctggttatgctctatcagtgtggacacgtcgatgcagaccaaggaggagtctttggcagcattgaggaacagcattgagaagatgcatcaagaggtgacagaccaacgtgaacggcggacgttgttgaacaagaaacgtgccgaaggctatcagatggtgaacttttctatcggagactatgtgctgagatctcgcgtagatgaaaagaaccagaacaaactcctcgtgacgtgggtcggcccttacgtcgtgacgaagtgcaacgcccattcgttcacagtcaagcatctcgtcaccgggagggagagcaacgtgcatgcctcccggttgaagttcttcgccgagtgcgatctggaggtgactgaagagctgcgtgagcatatcgcagcccaaggcatcgtgctaaaggtggaggctattcaccagcaccgttggaatgaagacatgcacgactatcagctggccatcagctgggaaggtcttgaggctattgaggactcctgggagcctttgaaggtcatgcatcaagacgtaaaggtgttagttgacgcctacgtcgatagagcaaaggatgaaaagctcacgacgtactacaatttgctgaaagcgtgatttggcggcagtgcagtgcactagcagccgagccgctggatagcatcgcgactagactacacagtgtgtgctagagtcatgtctgagactaagtaaccacgtaggtgcttaagtcgttgacgttgcatatagttatgcaagctaaacaagatactttgttggcatgaactgtggtcagttggccgcatgttagcttatatctctatggtggcagtgcaacctaagagacttcccagagagcttttgagtgaacatggcttgggagggaattgtagtgtgaggtggttattcaagccatgctcacacacattggggtcttgcagtgcattaccccagctggcatggactatgtgaagagtcaactaggagttggggagaactatctgtagaagagaacaatccgtagaagagcagaaatctagaagtagacactgacaggcatgagcgctgggccaagcatgctatgattccccacttttgaatctactcggcgatcaacactttaggaagtgccagcttccctatcagtgttcaagttattttcttaagcggaacgcgttacaggtttaagcttttgattcgatctcactttcctttctgcatcacggaagacaagcgtacatggagcaacgtgtcctactactgcagtactttgaccaggatggagtgtgacgagtttaatcgagttcttgggtcgtctggagggctgctagcgaagaaaaccgttatgatcatttctcgcgccttgaatgccaaagtgctccaagtgaccaagctcgctgtcgtagcaacaattaaattgtattagatcggtgttgtgccacagaccacacgcgttcccacacgctacgcttcttcctccgatactgttgtcgctcaatccttctacctaccgaaatgaatcgggcaacagatgcagatgagcggtaagttgatctacttacacgcggctgccaatcggcgagtattggcggcgcatgcggttctggcgccagcgcacgacagcgaagatcgcagcagcaaccgccgcgaaagccagggcaacgaagcccatgatggccgcgatgctccacttggccaccgacacgagcaggtggcccggcttctcttccttgaccgttttcgtcggggcaggcgccgcggtcggtagctcagtaggagcggagcccggcacgttcagcaggtgagcagcaccaccgaaatcgcaggtcgcgcccttctcgcggttgaggtgccagtactggttgaaggcccagtcgcactgctcctccagggtgaggaagcgcttcttgatgtccgagcagtcgatgtccgggaagttgcaggcaaacgcaaggccactcttgagctcgaactcctgaacaccgcgcttggcacggcacacgaactcaccgcgatcttccttcatgcaggccctctccacgccctcgctctcgtggtagtccgacacgttcttggggaacgcacccagacgcaccaggtccaagaagctccacttcgtggcgaactccgtcttgaagttccagaagtaccagccgtggcccactgcgaaaccgttcagcttcttcagggtcagggacctggtcaaagcggcgtcgtcctcttggccgaacgagtcctggctggtaacggggcacttgccgaacgacggaccagacataccagtaccatacggcccctggatcggcttggtcttgtcaagaggggtaccggggaagccctcgccgagatacgtgctgttgatcgggcagtctaccatggtgcactgcaccttcgggaatccgggcaggttgtcgttgaaaccattcagccacatagcgcagttgtccgtgccaatcgaccactcaccaacaatgacaggcatcatagcgttctccatgtcggagataacgtacttctgctggcaggcgttggagaagaagtccgccatggttccaggcgggttccaggcctggtagatgtgcgtgtcgagagcgatatcggggcaacccttgaggaagtcagcccagaacgacagaccgaagcggaacgagtcgtggatgatgaacttccaggtaggtgcaagcgccttcacgcgcttgtacgacttccagtagtactccttcagcacttcaatgggggtgagctcccaaggctcattcaccggttcgaggccgatgatggcattgtggcccttgtagcggttgatgatagcctccacagccacaatggagtggttcaggttggcgtagttgatgctcgagtagttgtgagcgtcgacatcaaaggtgccagcccattctgcctgacggataggccagtgctcgaacgtggtggtgcccacgggctgcgtgctggcaatggacgtccacttgacggacgaggccttgccactgttgtcgaagccattctgcgagccaatgaggccgtggatgtccagcaggatctcgatgtcgtacttgatcgcgaggtccgccacgcggtccaaagcctctacggcgccgtcagtgcagccgctgtagggctcgtacgggttgaacatccagtcacccacgggcacacgcattgagttgatgcctgcatcggccagggcagcgatgtccttctccgagacccagttgtcatagtggatacgcagctggcggttggcctcctccttaccgagcgccgtacagaacgtgtgcatgtccatcgccgtcttctcgggggcttggtctccgaagcgctgctgggtgttgaggaactggtagaagagcgtgggggtgatccacggctccagcacgagccagccgccgaggttcacgccgcgcacctgcttgttgaagggcgtggcgtgcgtatcctgggagcacgtctggtccgtgtcgttgggcttgaacgtcttgaacacgccgctgtcctgcgagaacatggacgcctcgccgtgcttccagtaccactcgtagtcgggctggtcgggcgtgtcctgcggaccggggtccgccgtcggggcgggcgttgacgcctccgtaggtgcctcggtgggcgcctcgggagcgggcgtgacgtccgccggctgcggtgccgcgggctcgtcgtgcgagtcgtccgcgccctcgggcggcacgtccaaagagacgacgtcgatggggtcggcggccatggcgctgggctgcagcgccgccacggccagcagcgcgcacagcgcggccgccgtcttcaagcgcgaggcgaccaacattctcgttcctttcacggggtccacgacgacgaagaagaagccacttgcgcgcgacggagccaatgcggaaatgagagacgcgggatcttttcggcttatgcgccgcacccgcgcctcttgcgaacgaagatacgatcggtcttgcaaaagtagccgcaaactagtattgaagtttgtatgagggggttgattacaggtacagaaatgatacattgaatggagatattacaccatggccatgtcgcgatcttgggcgttgaagtcgtcggattgttccagagacccacttccggcgcgtgatggctgccagccattgccgcccagccatcattgcggtgaaacaccgagctggcatgggaggaaagcccagagctgtgctcgcgtaaagcaccaccgtcgagaccaccttggtctggccgaggcgctcagctcgcgcttgatggtgagcgaggctggcgtgcgcccgaggccctggaaatcaggggcacttggactcaaggctgatcatgcgacagatccgcgatgacgtccataacgaccacgcccacgcccacaatcggcgaggccgttggcaatgcgttcgcggcaatggggctgccgcacaattcgctagtaggtacagtagggccacctcaagccacccacgagcgccgcagtccgtgatttgtctccaacacagcactccagggctggcgccattgcgcaagaacgctccaggcagccgtcgccagcgaggaatctttccttgccacggatccacaaagtgtatgtcgccacccccggcgttgtaccgcgccagcttatcatgcatcatggcgacgaagctcgatcgcattggttgtcggcaacttgctgcacctatcgctcggcagcagcacttccttccttcgattccagggcagactaatggtttgcatgctgtacaagcagtacaaggctcggcaggtaggcttgacaatgttgtcgtatttatcttatgatccccatcaactcataccttacagttcaatgccggcttagacgttcacgttcacgatgtgcccgatcaaaggcgagtattcggcccgcctcctgtgtcgcgtgacggccatcacaacagcgagtccgacgaagcccacgacgactccgacgagggtccagatgaggatctgcttgctcacggaggtggccaggaactcctggcgcgccacgctggacggactgggaatggccagaaggtgtgcggcaccgccaaagtcgcaagtggcgccttcctcgcggtgggcgtgccagtactcgttgaacgcccagtcgcagcgctcctcgagcgtgctgaagcgctcttcgatgtctgagcagtccactttgccgtcgctgccaccgcaggcaaagtcgaggcctctatcaaggtcggagtggtggacaccgcgcttggccgcgcagatgaaggcgcccttgtcctctgccaagcaggccgtgaacacttcttcttcggtgcggtagttcgacacgttcttcgggaacgcacccttgcggaccaggtccaagaagctccagcgcgagccgaactccgtcttgaagttccagaagtaccagccgtggcccaccgcgaaggcgttcagctttttcatgttgaggttgcgcgtgaactcgagctcgtcgaaattattctgctgaccgaaggacgtgttgcttgtaatcgggcacaagccgaaggacggaccagactggcccgtgccgtacgggccctggatcggcttggtgacgtcgagcggggtgcctgggaagttgtggcccaagtaggtgctttgcacggggcatttcgtcatgcggcattgaatgttggggaagcccggcaggttgtcgttgaagccgttcagccacatggcgcagttgtcggtgcccagcgaccactcgccgacaatgacgggcatcatggcgttctccatctctgcgaccacgtacttctgctggcaggcgttggagaagtagtccgagcgcgtacccggagcattccaagcctggtagatgtgcgtgtccagcgcgatgtcggggcacccacgcatgaactgcgaccagtactgcaccccgaagcggaacgagtcgtgcagcacgaacttccagtgtggagcccgggccttgacgcgcttgtacgacttccagtagtagtccttgaggaggtcgatgggcgtgagttcccacggctcgttcacaggctccaggccgatgatagccgggtggtccgcgtatcggtcgacgatggcagcgaccgtggcaagcgagtggttcaggtgttcgtagttgatggacttgtacgtgttcgtggcggggtcgaactcgccggcccaaccggccgagcgcacgggccagtgctcgaacgtggtcgtaccgatgggacgagtgctggcaatcgatgtccacttgacagacgaggacatgccactgttgtcgaagccgttctgcgagccgatcaagccgtggatgtcgatcagcaagtcgatgttgtacttgtaggcgaggtcggcgacgcggtcgagcgcctcgacggcgccgtccgtgcacccgatgtacggctcgtacgggttgaacatccagtcaccgacggggacacgcagcgagttcacgccggcctcggccatctccttgaggtcgctctcggtcacccaggcctcgtagtggatgcggagttggcggttggcctcctccttgccgagcgccgtacagaaggtgtacatgtccatcgccgtcttctcgggggccttgtcgccgaagcgctgctgagtgcccaggaactggtagaagagcgtgggagtgatccacggctccagcacgagccagccgccgaggttggcgccacgcacctgtcggttgaagggcgtggcgtgccgatcgctggagcaagtttggttctcgtcgttggggtgaaagttctcgaagaagtcgaggtgcgccgagttgaaaacgtggtcgttctcccaataccacttggcgtccttgacgacatccccgttgttggcgcccagcgtcgtgtccaggacgtggtcgacgggcgaggatgtcgaagctgccagcgacagcgccgacagcgctgcggccacttgaagcaagactttcatgtcaactcgcagacaccggagagtcgagtgcggagcggagagagttgtgcagtgcgcgtcaaaagcggaagtgagcaagagagcgcctcaaaaaagctctcgccgcggagccatgctgctgctgccaccagcggtgatgtcccctcgcccggccgacccacgcttgctcggctcggccggctgtgcccgacacagaccaggcaatgagtcacgcgggaaaagccgcgcaacaacttcaacgccgcaaagaccggcgggcgctggacgctcgccattgcgagcagcaactttttgtcggcagccagcagcagcatgacccgcgcagcgggctgccggtcgtgacctcggagaaaacggcggcggtctctgctgatcggcatgcgacgcatgcccgaagccatcatgcaaccgggagggcgcactaagggcgcgctgtcctctgccgctctctcaacatttagcgcagctgcatgcgataaccccttaattaaaactcccccgcggaggagacctccgccccaaaggcgcagcaagttgcgaaaacacgagttattgcagctcaagggagtaacaggtagtccgattatcaggggcccatcttcgacgtaccatcaaaaacttgcaaggccaccagcgttgaagtcctctgatcccccagacgaggagacccacgggtccagccgacggaagcaagcaagatcgtcacgcaaaactgaagcttccgttacaaatcttcaccaagcagcaaaatttagagcagcacgacgtcggccaaaacgggacccgccgtgcggagccttagagcaagagggcacacgaaatgatgccgcgagcactgagctctgtgctgttggcactgtcagcgcgcttgggcggtgtccatcagcgccggcgttggtgcatttccgctgcaagataacagcgacgatggacgcgagcgattggctaagatattgaccgttatgttcgaaacggataccaagggcggaatgtcagctgaaattcagacaccaggagggcatcacgcgggcggctgcgatgggcctgtaaaaccacaagtggctactgtacttgtccccattgctgcgagggcgcttgtctcgagcaggcacattttccctcagcgacggtgctcgtcgccctgatcgattatcgtcgaaccgagttcttgaagggggagtgtgatctcgatgcggcgtgctttgagaatggttctattggttctcacgggggaaaatacgcagtcgccacaagagtccgagagagccacagcgctgcttccagcagcaacggcaatagcaagaccgtcttgaagacgttgttgtaaggcaggctgcctgccccgcatcatctgcaccaatccgttctcaacgtggccacgcccacgcggtggtcaattggccttgcccagcccgcgggcgagtctgcagcacgctccgccctagccaacacgctgaacttggctttcacgcagcggccgcacgtgtaaaccaatgcacaacggaagctcgagatacttcgcgctctgcttggcggcagtaaaatccgctgccgccggcaacaacaccgccctagggaggagaccgagcgacagcagagagtgtcggcgccgatcttcgttggctagcgttgaagttcagaacagatggccgcgggagctcagcccggccgaccggaacgcgtaggcgagcctgcatcctcggatgaacagcagcgcacgcaggctcgcaaggatggactcggatgggctccatccacgaagagagcagcattgcacagagcagagcggtgcgcgcgccgagatggtttgcctatctcggcggatgcagctaccgcatttcgcatgtagagaaacacacccatgtcataggtttaggttaattactgcactcgagcctaaaaacaatgtaaaacccaaaacctgggtcacgcgatcatttcgtacacaaaattgacaagatggttggcctagtcatgcggatggcgcttaagctagcaacaagtctaggcgccatctacaactatgttgcacaggaaccactccacttaaccaagtatctacagcgttgcttcttctactaccatcgctgcagcagccgtgttgtgcgctctctcgagcttgcgcgttgttgtttaacctcgtgctccccatatcccgcactcaggcgcgcctcaactgggcccacaccaggcgtggctactaactatcactccgacgaggcgtatgcctccaagcgcgcggggagggggcagcgcgatgttggcgagcggtgcggtgctcttcccctctgccttcgcgcgcttggagctggtggctcaatgggaatgcaaaaatgcgcaaaatacccaaattaggggtgtatctctctacatgcgatcccacggacttttctctcgcatgtctgattggtctaaataaaggtgtatctcttaaaccgctgtagcgctctacatgcgaaatgcggtaccgcccaccttacattctcgccgcaaaggcgctgcggttgccgtcttgtgagcggcgtggacatgagcgcggctgatcgagtcactgatccacgttgaaggggctcacggctgcgctgtcggctgagcggataaattttcgtcgggaacgctttccccagcgctagtagcgccgctacgttggtggttctggcagcctgccagtggcaggtggccccggagtcctcggcttcgaggccgacgcgcagtggatcgacagggcattccggggcccccctccttgtgtggggtgggatgtggacgactcgagttttcgagtggctcgaggggatggaccgactaagatggcgtgcgtggtggctcgattgttgagacccgcaaacgagtctggaggacgttggtggacatgttcgcccagtactaaatgactagggcagcgccttgcctacagcagtgcttggcgacctgcgtaaatacatgtacacggcaagcactctgctaatgttgtgtccagatatgtagccattttgtaatggatacagtctcagtatgtagccatttccagctttctgccaatgacaacgcatctgtccaaaatggcaacacctccgcgcagtctccgcttcgtcgacgtggttgcttgggacccgtcctccccggaatggcatcgactgctgcgccagctcccagcgcacgagcagcagcaggtgacacgcttcatgttcgctaaggaccagaagctggcgctggccagtcgtttgatgcagcggcagctcattcacgagctcttcggcgtcgactacaagggcatcgacattgcgcgcacgcccgaggtgcgtttttgagtcagttatgtatattcaaactacgtttttacgactcacgagtgtagtgttgcgtcctggcagaataagccgtattggaagcgaccggcggagggggctgcccctccatcatggaactacaacgtctcgcaccatggcactattgtggcaattgccagtgattcccgcgctctagtgggcgtggacgtcgtgcggcttacagatcgtccgaagagaaagatgtcggtggaggagttcttccgagcttttgcagactactttaaccctagagaatggggatacatccaacagaccgacgacgaagatgaccaatacactcgattctatcgactttggtcgctgaaggaggcgtacatcaaggcggtgggcatcggtctgggcttttcgctgctgcgagctgagtttgtccgggtggattcgagccgggaagaccattgggagctcctcctggatggacatggggctagcgagtggcgcttctcatgcgctcaaatcggcgacgcgcacctcgtgagcgttgcgtacgggccgttctcggcagtgtggaagcctgaggcaagcgccctgttcccctgtgccgaaccgcttacgagtggacagattccccatcctactgaggaaagggaagagctggccgattggcacgaatggaggctggaggatcttcttctctagtgcttcaccaacaccatcacctgatgcattctagctgaatgctggttcgggctactacggatacgagcaaaccccggagcgagcgccactcccacaacaatcctggctgagttagtactctattcgttcatgcccgcattgctgcacagcctgctgtagcgtcgagactttgtcaaagttgacttcgacttttatgctgagatagtgcccagtaccacggagacggaaaggtaggctgaaggatagaatcatgcgtatctgctattgacctgctaggctctgaccggcttcgaaaatggcttgtggtactttcaatttgtattaccctacattatactatcgtttgtatgtgcttcgttgaagttgtcttcgaccaatagcagaccaggagatcccaaagtatcggatcgaattgctgctttgactttggtatgatctgacactagcgacaagcgagcgcaacgagcatcgcggaagtatactgtccagcgggattttcctgttttttgtttctctgcctgctgccgggagcgtatatacgaaatcacaggcacaacagtgctgttacaacacgcactcgaatgagctaatcttcgaattcattgcattgcattgaaacgccttactcaaacgaccaaaagaacaacatccatcatacgctacgaggagaaatcacagcaagacgactcgaaaccgcgcacgcgacacaaagcccgttcgttcgccaagaggtgctcacgccacctcgacgagctcccctacgagagtacgcttgctcgctcattcctccgagcggagctggcggtacgtcttctgcgccgacgtggcgctcgctccagccgtggcccgagcagacgcactcgctctggcgctggccgtagcactcgccgacgcgccaccattcgcagcggcgccatttccgttcgacacggacgccgtgttcgacgtgccgtctccgttcgcgacggagaccgtcttggtcgagaaggggttgttgccgccgttcgcattggcattggcgttcgcgttcgccgtggacgcgccattggcgccactagtcgtagccgtcgtagcaggggcgctgttcacaacagtagcgggagcgttgttgtaggcgggggcgctgttgacaacaggcgggggagcgttgttgtaggcggggctgttcacaggatagcccccaggatagcccgcaggatagccgacaccgggcaagcccacaccaacgtgcgctccgaggcccagcacgttggcaccgacaccaacaccgccgttgcccacaccgacgccgacactcgcgaggccaggcacaccgacactgacggcggggcccgcgccgtagccgtagccgtagccgggcgcgccatagccgacgccggggagtccgagcaaacccaaggtctgggccacctgtgtctcggcgtgaacaccggtcgacacggcggtggcggcgacgcacagagcgaagatcttgctgctggtgctgaggctgagcatggctgcttgggttgagtaagtagaagtagtaggggagacttggtccgatagaacgttcgggagagcgctggctctggcggagatcgagcgggttgcatcgatgggagggggaatattggagagtgaactgacgcgaggccgcagccagctagtcgcgaggctaccggaggtaaggcaaggcaagcaggcaagaaagcaagcgtcgatcagctggctgccaagtgacacggacgtcaacgccgaccagccgacgggtttcgcggcgtcagcatatcgcggggctagcgattatcacggcgaaggtggccctgtgggtggtcggccgatggggtcaccacggccgcgaccgtcgtacagatgctggtgcatagcgctggattgaacgacctggtgatggctggctagacgtcgatacctcctactgcgtagtgtataatacccttgaaggcttgagggaggagctggcaaagatccggaagggccgtaaggcatttggtgtaggtacttgaccgtcattgactccaagaacgacccttggcccgcaggcatgaccccatccggagtagttgatgttcatgttgatccgtactctctacgcgttcttattcgcattgctgcgactcagctcgatgataactgtagcgctgaagcttcgcttagtcaagccgtatgccggggtgatgctgggcaccacgtggtgaaagctagctgtacgataacataacctccgtaaaggttggcttggcttgttttggctgggctgggctgggctcggctgggcttgctcggcccaactgaacccgactgagcaaatggcttggcttcaagtttgtatcacatgcgttatactgatgtttgtatgctcgttgttgaagttgtgtgagaccaatcggagataaggagatcccaagcattggtcgagttgccgttcctaccgctggcacgacactaacgacgcgcgccacgagcatcatggcagcatgccaccacataagggatcatcctgtcaagaccagcaatgcctacctgtcgggtgtgttcatgcgcccacaacactcgagatagctacatgtagtctcagacaaaacctcaattgcattggattaaagttccttactcgacacgacaaaaaatcaaacatgatacactaggaggccgacaccacggagggtcgacacagagttccaaaccacacctcaaccaggcttccgacgaggatacacttattccaccgagcgaagctggcggtacgtcttctgcgccgacgtggcgctcgctccagccgtggcccgagcagacgcactcgctctggcgctggccgtagcactcgccgacgcgccaccattcgcagcggcgccatttccgttcgacacggacgccgtgttcgacgtgccgtctccgttcgtgacggagaccgtcttggtcgagaaggggttgttgccgccgttcgcattggcattggcgttcgcgttcgccgtggacgcgccattggcgccactagtcgtagccgtcgtagcaggggcgctgtttacaacagtagcgggagcgttgttgtaggcgggggcgcagttgacaacaggcgggggagcgttgttctaggcggggccgttcacagtcggctggattccacgtcgggacagaggtggcccagaccttgggtttgctcggactccccggcgtcggctatggcgcgcccggctacggctacggcgcgggccccgccgtcagtgtcggtgtgcctggcctcgcgagtgtcggcgtcggtgtgggcaacggcggtgttggtgtcggtgccaacgtgctgggcctcggagcgcacgttggtgtgggcttgcccggtgtcggctatcctgcgggctatcctgggggctatcctgtgaacagccccgcctacaacaacgctcccccgcctgttgtcaacagcgcccccgcctacaacaacgctcccccgcctgttgtcaacagcgcccccgcctacaacaacgctcccgctactgttgtgaacagcgcccctgctacgacggctacgactagtggcgccaatggcgcgtccacggcgaacgcgaacgccaatgccaatgcgaacggcggcaacaaccccttctcgaccaagacggtctccgtcacgaacggagacggcacgtcgaacacggcgtccgtgtcgaacggaaatggcgccgctgcgaatggtggcgcgtcggcgagtgctacggccagcgccagagcgagtgcgtctgctcgggccacggctggagcgagcgccacgtcggcgcagaagacgtaccgccagcttcgctcggtggaataagtgtatcctcgtcggaagcctggttgaggtgtggtttggaactctgtgtcgaccctccgtggtgtcggcctcctagtgtatcatgtttgattttttgtcgtgtcgagtaaggagctttaatccaatgcaattgaggttttgtctgagactacatgtagctatctcgagatgaacacacccgacaggtaggcattgctgatgtttacaggaccccgtatgcggagctgctgccgtgcgcggctccagtcgacacaaccactaatctcatttcaatgctaatcttgacagggtgatcccttatgtgatcgcatgctgccgcgatgctcccgcgatgcccgtcattagtgtaccaagcctattatctttagctggtttgaaagaatgatcagccacattgtaagtattgtaaaatatttagcttaaaaatactaaaagttttaaaatttaaaatataattatttctttgtagctcgtgttatgccaactcggcccgatatttgatctacgattggccacgcaacttcaacgacgaacatacaaacgtcagcataaagaagataaatgaaaactttaagatcaagcagaacccaactcaatgcaatcggggctttgtgtctgagactatatctagcattgtagacgtatgcacccgacaggtaaacaacactggtcgttctttacacgacgatcccttggctgttagcatgctcaacgtgctgcgatgctcgttgagcccgtcctcagtgtcataccaggagtaagaggtaggagcagcaactcgacccagatcatcaatgagcctgtgtttatttactggatagtctgcgcatctttcgggggcctttgaaaaaaaattgcttaaattcaacggaaaagatagagcccatgtttttagtcagagggggtgaaatgaacccaaatctatcgggagcgtccaagcgaaatcgacaccagcggcatttgagaggcatgaagagtctgcaaacttcaccctagtgccatagctagtcatggtattccctcctcaacgctgggtcggtcttcagagggcttaaagcgccggcaaagcgacgtttggcagccgaagatcaccttagcccataggaattgcatagtgtttgtaggccatgacacccgtcccacaagccgaacatgtttggccatgtttcaacatgtttgaccatgtttgagatttcttacttgtttttagtatgtcccttaccctagcccgtttagaaaacatgggctgtatcaacggactaaattcaatcgtagtgaattaacagtaaaggtgtcaggaccttctcacgatcgctgaatgttccctgccaccttgcactactaagctactacatgtagtcgaagataagtcggtgaacctgaagaatatcagtgattcatcagtttcaaaacaacctcatcgttggcaaagcacacttttccaaacacttcaacaccgttgtaattgtgctgtgtaaggtaagtagacacaaaacctagctaggccttggtgctcgattgcgtcgccatgctgcgtcggtcgtctcctccgcagcatcacaacgccacgtcgaattgggcgcatcatctcctcccccttccgtcactgcgagagtcaattgcttagccggagtccctcccgctctaaggagtcgggaacaacatcttgcggaccgtgggcttgaggtcgtagtagatctggtccaggcgcgtgtccagcgtgttgtcgcacacgatcttgccctgcttggcgtacagcacgataccgccggccttggagtcgggcagcatgccgtccgcggccttgttgagcgtgaccttgaccttgctcacgtccacgttggcctccttcttgacgatggcgatgtacttgtccgtggcctccttgagcacggcctcggcgagacgcacgtccttggcgcgcacggcgaccaccacctccggctcgaagagcttgatcaggccctgcacgatcaggtcgcgcagcagcaccttgttcttgtcgtcggccgtcgtgtagttccgcagctgggcctggccctccacgatcagggtcttgagcagctcgtcacgcgcgatcatcttctgtcgtcgcgaggcgccgatctccgcggagcgcgcactatgaaaagcattaaaataattactaactgctgcaatattgcagggcaaaagacagtggatccgtcgcgtcgtcgctcacatgcgcttgttgatctcgcgctccttctccttgcgcgtgtactcctcctggatcttgatcttggcgttgtgcaccagcatctgcttctccaggttgaagtcgtgctccgtctagcaataagagacaacatacagcaacaggtcagctccctccgcgttatcagctccagatataaaaacattttaccttgatgcggatctcgttggccttctcctgcgcctcctggagaatgaaattcaccatctgcttgatctggcggtcggcatcggacgcgttcatcttggctctcggcttggggggcgctctcctcttgcactctccacactccactgacgtcgctcacactaccgcttccgcttctgcttttgaagaccttcgaacgagatcttccacttcgcacttagtcgaatatcctcatttcacccaatcatatcgtcgtacttagtcgatcaccttcttttcagccaatcgacagccacatctcctcgtcagttcgagcttttgaccaggaacagagacgaccgcaatgctgagggtgagggcgacggtgacggtggcggcctgcgctgcgcgccgcgcgcaggcgctgcgcctgctgtccaccaacccggacgtggacaacaacgccttcgtgcgcagcatctcggcgcagcaggcggagaaggcgctggagcgcggcgccgccatccgcgcggaccacgtggccgccaagagcgacgccgcgttccccgccgccagccagggcgagcgccgcgtggacgcgaacgaggccaaccgcaagcgcgtgatctaccgcagcaagcagcgcggctggctggaggtggacctgctgctgggccgctgggccagccagaacgtcatggcgctctcaagcgacgagctgcgccagtacgaggacattctgaacgaggagacgatcgacatcttcaactacatctcgggcaagagccccgtgcccgcgcgcctggacacgcccatgatgaagcggctgcaggactactgcctcgcgtccccgctgggcaaggcctcgctcgaggggttcgccgagaacaagaagttcatgagcaactaaccaatgaactgcctacagtagacacgggagctcgtactgcatttgggttattgtttttgctctatcgtagtagctacagtactacgacgcttggttgtgtttgacgttgttggtgttggttattcagctgatgggcgacagcggtagaacgagaggttgtggacgaccatggcgaggcaaacgaggagctggcgggactcttccggtagcagcaagcggctctcttggaggcgcaccatcaggcggagagtgaggtggaacgggacggggagcttcatgtcgtggtagagcacgttcttgtcgttggtggcgggcatgatgaagccgaagcccagcaacgtgtactcactaccgttgtagaagtctcctcgctcggtggtggagacgacctcttggtactgcgggtttgcggctcgagtctgcgcgtaggaggcgattgagcggtccagagcttccatttggctcgctagctgactgaccagctcgactagttcactttcagcgaagttgccgagcatgggcacgctgtggttgagctgcatggagatcatggtgtcgtggttggtatcggcgtagtacgagactacctcgtccagtaccggcacttggtcgtccattaggctttcgaacacgtgcagtggggtagggtcgctgcttatcgacatgttcacagttccgagcactgcgtcggcgaactcgtccacgtcaaggtcgtgggttgagaaccagacggtggaagggccttgcagaccgtcgctaagtgctctcctctcggcttcaaaagccacttcagctatcgtcatcagcgcctccagtcgcatcgatcgcttcgtgactgggtccacactcgtgttagcgaatactggaaacagcgacagtgtcaccagtgaaggcgtgtagacggtaacacctgactgcatcaagcacggactctccatcgtgcaatccatcgcgttttcatcgcgaaagcgcttgtcgaacgaaggatagccatagaaatgggtgagcgcggcgtacactccactccttgacgagaaatccgtcacattaccagcgtgatcagcagtatcggtggcagaatgacccaacggtaaacctgctgctgtttcaacgtcacttgagatccctgtcacgttgttggtagtgttacgatctccagagttcgttggcgaaagttggagaaaaactgacaaggacgggaaaagcgagtgtgtgtcgttcgagcggagcgtgaagcgaggaataccagtctcgaagtaaaattcctggaccagcagctggatttgctcaagtgcttgaatatcgcgtgaattcattgcgctttcgttcagacttccattcatcaccttgctgactgatgatacattcgttggggaggaggatattccatcgagttggcgcgataacttgcttccagagccagcacagcttgatgagcacgactcaatcttgtcagtatcaccgacgcgactcacattatcctccgtgtcgtctagcgtgagagtctgcatgagctgcgctgtaagatttcgtaccagatcgagtcgtggggaccacaaccacggataactatcagcaggcagcgttgctgggggtagattgtcgtcgcgggtgtaatactggtccgagtagccttcgtacggagcaaaagccgcagtgtatggcgcgtacaactgcgctcgcttgcttgctccatcgaacgcataccgcaaagtcgcgttaggtcgagcttcttcgtcctccgccttaatgatggcatctactggcagtgagagattgaattctcgtaccatctcgctagcgttcatcaatgcgaggcgtttggcaagcatttcgttttcgaaataccccacgtaatggctctggatgaggttccacgccacattccccagagacttcagcagtggcagcgccaaattgtccgtgagaaacatcccgatcgccttgtttcgacgccggcgaactttgttcgacctgatggagctcccgtagtccataggagacacgagattgtacatcagcagccgcggtatgtccttctttaaggtgcgtcggccctgggtcgacagtacccacttggagatccagggcgtctgggcttcaactgcaccgcgatagtcagcaaagctgtggaaagtcgagtcattgttcgcaggcataacttttccatccgatcgacgcttccagtgaacaggctggttcgagtgcgggtggtcttcactccagtaatcgctcgtattcagaggcgtgtgtgtagtcaccatcgatgtcttcgcgttaacgaaggtcacgctcgcggctgatgtcagcattaccgccaaaatggccacgatattggccactctaacgctcatcgtgtcaaagaagttttgcaaagtgctgaagaatctgcagaacaaataagaaaaataaattctggcggcttcttagtaaatgcaagtcgtgctcgaagtcaatctgtaaaaacagtcacgttgcctcattcagttcagttgtggctaagagtgaccccagccaagtagcttccacgagaatttctttttcttcttacccttgagcccagtacgcttggattcttgtagttttgccagtttaaacgcttgccggcactcgtacactccagagacactcatcagccacgcatttctccactctgttttcgtaaagatatcggacgacccgagggctaccaccggccgccgcagcagcaataacagcattggacgcctgctggcccagctccgtatgcatccacttgaccatgttaaggcggcacatcgacgccgccttcatcagtgcttccgagctgcaccctggcaagtatttcgcatgtagccattttgccgcaccgagacttcctccaatcgcaaggagatccatatctgcagtactgcagccctccgaccggttgttgtgcagccacttcaccatatcaaggcagccattacgtgcagccccatccatcgctgcgtgcgtgcatccttctagcgattctcgtgcagccccatccatcgctgcgtgcgtgcatccttcgtagtgattctcgtgcagccactggacaacgctcatgtaaccacgacttgcagcgccatccatcgcagccttggtacaaccttcaaagcggtgttcgtgtaaccatataacggtgttgatacgtccccgacttgcagcgttatccattgccgcgactatgaagtctgcgcaggcgttctgtggagtaactcaacgatactgagatttctggccacagccgcagcatccatcgcctctgacgtgatctcggcctcgctgcactttactttatcatatggtaatcgagatagatggctttcatcctcttgcagaagccatcagggtccgatgccatttggccggatggatgagccggtagcgctctacaccttttctcggtctacctgagcaaattagacaagcaaaggtggcatgttttagtttggggtgcacaagaagcccaaattaggaaacggaaatctgaaattgacaaacaaaaagctgcctaaccttcattcaatgtgaagtagtacagtgtaccaaaaacactactcgccgtacaaccatcaattgctcgcgtacggagacttcgcgcgcgcgccaaacgagctgcgcttcgtggaggctgacgccgcggggctgttcgttccctgtagttcccataattgcaaaacgggcatcgtgtgttgatccgggacaaggaaaaattgaaaatgccgtgactgcgatgaaagaatgagtggaaggcttttcagggaaatcctctaatgtttttgcgttttctttgctgttaacgagagttcgtgacactttcattacctcaaagaaaaaatgggtttacgcaattcgaaatgacttgatcattaatttaccggttggctttgaaaaaaataaacaaagtgttgtcgtcctccgcgcgtatccagtatcaactcagcttgataaagaaatgttagacaaccgattcgccttcaaacggagatcagctcaacgaatgaaaattgtcgagaaactttgcaaacctgtgtcttctccgtacagattcgtgacaacacattcggcttgcttcagtcataacgaagctaagctagtggaagttgcacaagctaaacagcttccacccaaacgttttctttttgcgctccagctcgtcacgtttcttgcgattgtgaatcgccagcgtagatgctcggcattgctcgcacttcagtaaagcgtccgcggcagccttttgtccgtttttcttggcagcgatgacagcttcagctgaacatttccccacgttgttggcgtggggatactcgacaatctgcaagtggccgcttgccgcagcagcagagatggcagagttcgacgccggctggccgagctccgtgtgcaaccactggaccatttcgagatggcccttcgacgctgccttcatcattgcagccgagctgcaccctgccaaaacgttcgcacgcagccactttgccgaactcagacgtccttgactagcgacgtagtccatcgcagcagcactgcacccttcggagcggtaactgcataaccatcgagccaccagcgcgtggtcattcatcacagccgaatccatcgcggcagtggtgcacccctcggtgcgactccgatgtagcaacttcacaacgtcaagacagccatttccggctgctccatccattgccgctgtggtgtacccttcagaacgattttcgtggagccactggacgatggggagatggccattcttcgccgttccatccatcgcagcagtggagcagccttcgttgcggttttcgtgcagccatttcagcatccgaaggtggttgttgctcgcagctccgtccatcgccccttccgtacaaccttcgtagcggtatgtgcgcaggtattgcaccacagcaagacggttattgcatgcagcgccgtccattgccgccttcgtgcatccttcgtagcggtttgcgtgcaaccatttcaccatattaatgcaacccttacttgcagctccatccatcgcggccttcgtacagccctcgtagcggttcttgtgcagccactcaacgacaatgaggcgacctctgctcgctgcttcatccatcgcattgatgctgtcggggagccacttcaagatagcgacgttgtttactttcgccgcagcctcaatcgcctccagcgtaagttttgcctcgcagtgtgtctgcatccactccagcgatgcgaagtcttccttgcggccgctgtagatttctttcgcccttgcacaacccgttagggtcgtgtttattgtgatgccatagtgtcggatgtgtcgacccgtcttgtgtcaatccggccatcgcgcctaggcgcaagtttgagaatgctgtgctcgaatcaaagcaagcaatgcccatgacggacaacgacaaggaagcagctctcccagaaacgtcttcaacggtattcgaaggcataagcggtatcctcgccaagttgaagtggtttgtaccacaaattgggtacatgtatccaaccatcgcatttctatcgcattatagaaatccttccagcagagcagcatgtcgacgagccacggtgcgcccccggcgggcttggagtgcatggcgacgatggacgacatcacgcaggaggagggcaactactgcgagttccagacggcgcccagtggcctgtggcacccggcgctcttctgcgcggacgtggtggagcagctgctgggctcgcagttccacacgttcatgaagaaggtgcaggaggcggactgcaaggcggagctgcggcgcctggtggccaaggggcctcccgtctggctcgaggacaagcacgcgctgccgctgcccgagggggacacgcacatcgtccaggtctggttcgccaaggacggccaggagcgcagcgccaagctggacggggccctggagggggaagcccgcgagaagctgtgggaagagctgcggcagctcatggatgccatggaggaggacaaggaagaggtgcggtgaaggtgtagtatgaaagggttagagcctggaagtcgatggcctttacgatcataacaagatcatctagactttcattgatttggggtgagcggaagtgttgagtacgtaacccggtggtggtggtgtgctggactggaattgctagtattgtacaggcagggggtcatgaagctcgttagcttgtcaagtatagatatctttctaacgtgacagtgccaaaagaaaagttgtagacttcgtgctaagctacgccgctttcagtccttggtagtgcagatccagataaacgcgttttctaagccccatggaggacttacgtttgctggttggtgattgaggaggaaaagtttgctacgtaggctcctgacaatgctattgaccgagatagcagcgccgatcgccatccaaacgttgcgaggtcatggcacggttgtcatacagtactgtgtgcgaagttacggagactgtgttggagtagagctcgaccacgatgtcatcaaagtgcttacgaccgtgatacgtatacgaacaacaaattcccactcacgcgagccgcgggtgccgaatcgacacgagttgccgccaacacatacagtagctccaatgtcgtggccactgttcaccgcgacgctgatcctcgactgggaatgttcagtgtaccaagctgtgctgcaggagaaccgctgagcagctctgcttctagctacccatcgccccaatagctgaagccctacgcagccgatacctcagcgccagcaggaagccaccccaggtcatccttttatcgcccccggcgccgctcgtcagccattccgacggtgcgccgcgtgtcttcgccgccaccgcgcgcagtttaacatcggtgacgaagacacgggcgcggggcactttaacgcgcatccatcttgttaaaccgcggccgccaaagccttctttcacttccaccattcgtcttcgtcgatggcccatcaggcgcagccagcgccgcctcgctctcacctcacgcatcggaatgccgcctcccatacatattctcgtccgcagcccggtttctgggcggcgtcagcgcggcagcgagggccacgacagcggcgctctctccgccggatccgcgatgccatctctttcgaccacgcaagctgcatcctcgtgatgatgacatgctgaagctgcgccatgtcagaaaaaatagaacgtcgcttgcgtcttttcgaccaatcgctctgcgtaaaagcagttttacgccctcctattggtgctagcctttcgatttacaaccaaccggagccgcgcatcaaaatgctggtcttcagcgatcaaggcgaggcaacaatgctgtcgcccgccgagcaacaacacgccgcgtccgtcctcacggcggcgcggctgtgctcgggcgtgtgaatctcggtccgtccacagcgccgctccacgccccgttctctgggcgccactatggctgagcctgacatcatcgcgttttgcgctgaaacgtcacttggcgcccgggatacaaacgccaagtgtaattccgatgacatcaacggtgcttcgcgcaagtacgtcagccagcgcgcagaaaaaggccgaaaaacaatgcgcttcatcctccgcccccagctcttcaaacgctgcgtgtacatgatcagcagtggtggtggtggttgccatccaccgccgcaaagcattgggacgtgcgtgggccatcgccattccgggatttccagtcgactgcgcacgtccaccaccctcacacagcttgagtaagagcaggaaggaaggcagccagccaccatgatgtccctgtcgaagttcaagaaggaggccaactggttcatggtctactacctgacggtggtgcacctcggcgccatcgagggcctgcgccgcctcttccagtgcaagctcgagacgttcccgctgtttgtgttcatctactacctctcgggcctcggcatcaccatgggagctcaccgcctctgggcgcaccgcagctacaaggcgcacggcatcctgcgcttcttcctcatgctctgtaatagtatggccaatcaaggaacgctttttcactggtcgagggaccaccgcgtgcaccacaagtactcggacacggtggcggacccgcacgactcgggccgcggcttcttcttcgcgcacatgggctggctgctggtcaagaaggacccgcgcgtgctcgaggccggcaccaagctcaactacgacgacctctgggccgactggtgcgtcgtgatgcaggagaagctcaacccgtgggggcagctcttcatgtgcttcgtgttccccacgatcgtgggcgtgcaggccgtgggcgaggactggaagaacgcgctgttcatcctgggcttcctgcgctacgtggccgtgctgcacgcgacgtggctcgtcaacagcgccgcgcacttctacggttaccagacctacgacaacatcccgccgcgcgagaactggttcgtgtcgatctgggccatcggcgagggctggcacaactggcaccacaagttcccgtacgactacgccgccagcgagttcggcatctcgggccagttcaacccgaccaagctcacgatcgactgcatggcgctgctgggcctcgtctcggaccgcaagcgcgccacggacatctgggccaagatcaaggactccaagtcgttccaggaccccaacggcgacgacccgaccaaggccttctcggagctgaaggccaaggccaattaaccgcagtcagtcagcatgttttgtagtacgtccttggggccttcgcgggctcgtcaagtgaagtagagcgtgggccgaagagcctcacgccgaagaatattttcgctaacaagcttaccttattgatcatcgattgaatgttctgaatgttcagcttgtgttcaagtggtgccaggctcttgcacttttagcagtaggcctgaccagcgcgagataattttagtgctcgtcgtcttggtgactcggatctggcaggcactgcattggaaggcatggcgggcgagagtgagagcgacacggttgaatcgctgaagagccgagagaagctcgagcgcgtgagtgaaagtggacctcaggacgatgaagactcgacggtggatgccacacaaccgatgatggacaagctggcggcgttcgcgctgcaactgatggaggagttcctctctcagtataaactggaggagacggtgaagactctacaagcggagcttgagaggaagggggccccgcgacctgatccgcagctctggtttgagatgcacagtagctgtcgagtcgccatagctcgaggaagctcgaccgccagcaagaagagtacgctggagaagctgctggccttctgcgtgtccccgaaagtagctctagcattggatgtcatcgccccgcccgtcacattgtgccttgcgtcgccacaacccagcagcatctccaagctcaagcaaacgtcgttctcgctccgacaggcgtacagtcaaatgctctccccggtcgttcgacctagccagcgacacaagcagcctggaacaccttcatccacgcccgttgagcgacggcataaggcggatgcaacggtacccgaaggcaaaggtgagccgtccaaccccggggatccccccgacatcgacgtcattctcgaacagagcgagtctcgaccttcttcgtcttctgcgttgggtccgattgagctccagcctcaaactgtgacgctgtccaagaagcggaagtccaagaagaagcgcggccatggatcaggaagtgacagcaacaacaaaggagtctctcaacctcaccgccacccttcacggaccgagagttcgatggtgatggcctacgatgagcagatcaagcgagacttgtcgtctggccgacttctagcgcgcgagcttcgtattctccgagcggaacgcgtcaagtgcgatacaatccgtcggggcacggcagcgtacgaagcagcacttgctcgacacgatccgtacgctaaggaactcgttcgagaacgctacggcttcatccatcgagtggagtgtgcgctgtgcacattcccgttcctcccagtgaacctgccgcatcgcgtgtcgttcaagtgcatcatggacctgcacgagttctggggctacacgccgcctcaacgcgaagttgcggctcgatatcgaccgccactttgctacgacgcggtgcgtgtctgtcggatgtgtgggccgatcctcttccagcacaccacagccacgcccagcgtgatcgacgagcaactgagcccgacaatgcctcgcgctagctcactgagcgctctcagcaccaccggcaaaatgtctcccaagacgaaagctcgagctgcgatagtcgacaccgaaagcgtcgagcgacggacgttctgttccgacccgtacgccttaccgccattgtttggcgacgatttgatcgaggatggagagagctacggggtcgaagacgtgccgagcgaagtgctgcgaggcaatggtgctggagcagcgcaggagttcccggccaaggcaattgtgtactcccagcaacagacgaacactgtggcgttcatgagctccaaggaatgggaggtcatcaaccccatgcgcagcagcatccgccaagtcatggagaacacagtcaaatggccatgacaacttaagactaaaggaagacttattggctagagatggatggaaaccgaagcattgcattgacattaggcctttcggatcaacggcaggcaacgcctactggagactaccatggaggcaagacgcttaagtgctgtcctcgccctggaactggtaggtcacgtggcacttgccgcagtagtggcggtcgaagtgggtggccatgaacacaccggcaccgcactggggcgacgggcactccttcttcaggcgctggatctttccgttgtcgtccaccttgtagtacttgagcacggcgagtttgaccttgcggtgcttgtgcttgatcttcttaggcttggtgtacacttttttcttgcgcttcttgccaccaccacgcagacgaagcaccaggtgcagcgtgctctccttctggatgttgtagtccgaaagagtgcggccgtcctccagctgcttgccggcgaagatcaggcgctgctggtcaggggggattcctacaaaggcgaacaacagcatcagcatctaactctgcatgcaataggtgagagaacagtcgtatgtgcacctaccctccttgtcctgaattttctgcttgacattatcaatgctgtccgacggctccacgtcgagcgtgatggtcttgcccgtaagggtcttgacgaaaatctgcatcttctgtagtcataacgtcgcgcgttagtcccacgcaggtctgggaagtgccctaccgcatcggtcctccaaaagcctctcggcaggataaagagaggcacagtcaaacgaggagaaagagacctcggactgcaacgctctctccaccaacaaaagagcgcaaaggacgtagtcctatgcagcataaaaccctccgtcttttgcgttctcccattggcttcgtgaacggcagcttgatggtgttcttctactccctcctccgtcttcctgctcctcccccttgtgattggctccggcggaccgacgcggcgtcttggcctagcaaccatgcatcatacatatacctacggatcagaggccagctcggagccacagacgaggccccttgccgacccccaatccgatccttgatacacgcaggacgcggatgatttcttgcaagcgacggctgccccgaggcgaacggagggagggacccacccagaagttcacggtctggacgtcacaggcagcgcgtcgcttgggccgaaagcgccggcgtcgggagcgagtgggggcatctaggatcgggatccgcaggtcttgggcaagcggagctcagcggggcgacataccgtcaggaggtttccaaatccaaactgtggaccgcagtgtcgctggagctccttgcacggcgcagcccctggcagccaccaattttttgtatttaaagtcactcaagcgaggagtgacggccgccaattttatccggcggcgccggttggttggagaaggtacggcagggtgattggatgaaataagggaatggatacttattatgggagatgttaagtatacatttaaagtttacatatagttgaggtgactttattcctgttgcgacgacattggccattgctacctatcgcccgactcggtcgagccacaagctgtgtgccagactgtgatccagaactcattgtcttggcagtgccaagatggcaccgacatgcttgcagttgaagtgggcttctatatctactagcagtcgcaatcaacaagcgcgggctcgttctcaatatccgtagtagaggtacgcgcggcacgttcccgagcatgtgtccctgcccacctgcgaaaagaggagcattagcgcgcgagccgacaagatacttttggcgggcagcaaccatatccgtggtaacgtgcatcgagcaattggtcccgttgagctgaccactcgcgcggattggccagcgaggttgaagtgaacgtccagctctgtgtaacggtctccgatgagcgagcaccacgccagcaaccacaacgacatctggagcgctaccgagctgccaggggctcgcctggcgccagtcgaaccgggcccgaggctccagaggcgctggcgcggtgccgtcgcggccagttacccggagccgatgcgaatcagctcaaatcagcgtacgcactcgcaactgccggcggttttcgctgctcggctccggcagcgtggtgctgaaccgcctccagctcgtccgttcagcgccggcagaggcggtggctaccgtggcgacggctacgatggcagaggtagggttcggcgggcgcaaagttcagaaacgtggtgctggtggccgtgagctaactggtctgagaggcagctagctatccatgcgcaagacttggcactgccaagttggcagaggcaccacgcccgacgcgaagagctcacaacgagatgacagcagatgagtcgcgctgaacgctgagaaatgggtttgatcgtcgaatgcatgtttgcacagtcaagtccggagctcaagtgccttagcagagaccttcatgttactgcaggccaattaccgccaccagccttagggccgttcttaagttcccggtcccaagtcccgggacgaaatagagcgatttgattggctttcagaaagcgtgctaggtttatttccgagctcgttttgtcccggtcccgcatcattttcgcgtggtcgggacgtgggactttcgccctagctacttcatttattcgctaatgcgcgccaagtgtgcaccactttgttacgtttcgaaagggctatctgaccatgttcttctttcaccgtagttcgcggtagttcccgagagttaggggcttaaaaaatgcttacaattatcaactttgacggacgacgggtatcgtcccgttcgtcccggtcccagctcccgggaacttaagaacgcgccttagaactctgtgcgtggtttcatcgcaacaaaagtccacgctacgacagatcttgtcaaacgagctgtggacgaacagaactcgagctgcgagccgagagccggggggaggagaaccgcatcaagccatcgagctgcatcgtccttgaaaggccaccaacggcagagtccgagaccaggctcgctcgctttcgcgctgcctgcctcgtgctttcccgaggcttgcaatccagcgtcgcggatgcctcaaagatgggtacggggtacctcccgccaaaatttaatagcctcaagaagcaccaccacaacacattgatgcatgcatgagatcccatccacgctcaagagagcgccactgcgcacgcttgggttgcgctgccaagtgtgcggctcgaggcgaataagacggcagctctctgccctcggcttctggagacgaatttgccgatggacccgcctatgcagcgcgcgctgaagcaaaagatacccagctgccgttatcccgggctgcgatacgtgcgaacatggtctcatcggggcatagtgaaaccgagtcaaagtccttcgattttcacgacgagcagacgcgagcgaggagtgctcctgctcctgctctctgctggctcacaaccgaatttgcgtccgtcgagcattgttgcaccccgcgctccatggcggacgcggtgtgcccgcccccgatcagcaatgggatgctgtcgaccttcacgctcgagatggacgacgagagcgcggccggtgcgggcccgttccgccactcgctcaacgacgtgaccgccgcgcggctgcggcgctaccaccagcagagcgaccggaggctgcacgccacgctgcagctcttccgggagcgcacggagcgcgagcgccggtcgcgcctgcgcctcagtcgctcgccgctgagcgtggcggccccggagctgccccggatggccgctcccggccgcatggccgccgtggaggcgcgccagtggaagctgctgcgcgagagcagcgacatccgcgtctaccgcctcaaggcgcggcaggaacgcacctccaccgtgcaggcaatcggcaccgtgcacggctcgctgggggacgtcatgaacgggctctacgcggactcgacgcgcaccgccagggtgctgcagatgctgctgagctcgcgctcgctggacgcgcgcgtgctgcaagtggacaagagcagcacggaggccaagcccttccagttctcgggcatcgtgtggacggcgctcaagctgccgggcctgggcttctgcagacacagggactttttgtgcttcaagaagatggatctgttcaaggacgagctgggagaggatatgggctacgtggtgctgcactccattgaccccctggcagacgagatctccccgcaggtctcgagctttgatacctacgcggcgacaggagccacgtggccgccgcttaatcagggacaccagaaccgcacgcgcagcgccagctcggctggattcggctcggggaactttgtgcgtgggtttatctcgctggcgattgtgttcaagagtgtaggcgaagatcgcgtggccatgttcgcccacggccagttcaaccccagtggccgcttgccgccgctgcttggagatagctgcatcgctgagtggctgacgtccatcgcgaacacggtgcagagcggccaggccaagaacttgtcgctgctcttggttgggcagaggcaaacaggtgcaggtgtagaccactcgggctctagacagcgctgtggggtgtgtgcgcggtcgctgttcttctgggataccccgcggaactgccgtggctgctggaagccgtgctgtcgtacgtgccgcgtgaccaagccgatcttctgcgctcactaccattccagtaatgctgcagcgggtcagacgtcgggcccatgcaccgagacgttctgtctcgcttgtgtatgtgcagtgatcccctccggcgctaccatcaacgctcgactgatcaagcgcttggccaagaaacgcaaacgtgcgccgaccttcttccgacccacaatgaccgcgtcatcgatcacggacggctcacttcctcagcaccagcaacagcaggcgacagtctctgagcgcgcggaacgactgcttgcagctgctgagatgtcctccatttccgtgttgtcatcgctggagtcggagaagcatcagcaacaccgattgagcctgaacgctcggccgaagaagcgggcgttcttgcagtcacaaccggagatcaccggccaggaggttgaagatggtgaggtcgaggacgccgcgagcacaatgctggaggtgctggagcactaccagattcgtcgcgggggtaccgggtccgtcatttcgggggtatcgtcgtcgaacgcggggacttcgctgcgatcgttcacgtccgcggacttggcgacttcatcgagcctccttctcgggcgatacccctctggaaacagtctgctcacgcacaacaaccagagcttcctccaacgacctagtgttcctacgacgacgcgacagtgccaaacgccgatggagcgtcgtggatcaagagctttccagaaccagagcagcttctggctgccgaaccagtcggtcttggtgaagaagacgcaagaatcatcgcccccgcttgacgacgaatactaccagcgtttgctgcagaactatctgcttcacaccaacagcagtcgcagcatggtgagcgcgctatcgttcagcagctatggtgccaagtcggcggtgccccagccgccacactcgcaggaatccaacgtcctctcggaaccgcaatcggagcctcccagtgatactcgagctatgtcaagctgctcgcctaccaatgggtccatgtcgcttccaccggaggcggtcatctatcgccggttcaaatgagctagcttgacgcagctggcgatgtgaatattgtaccaaattgttcaaaatgctttgaagatgtcgaatgaaattgaaggacatacgcatgtacagcaagcaataaatacgctttttgccactttataccgagcgcttcgctcgttcgctcgtttatcaacacaccgtccgaagctgcaatggctcaagcatcaccaggttcgatttctgctgtttcctcgagtagctcgtcattaggcggatcttccttttgctcatccgtttgttcttcacgcaggtcgttttcgtttggttctagctggcttgggtcaataagcggtgggttgcttctcctgcctctgggggtccacgtgccgctggaatggtgcgaatgcgctcggcctcccgagccgctgtacacttcgagccctgggatcccaagcgtgctgttgatgcggacttcttccatctcgcttgcagtcatttcctgcttggaagttctcttacgctggagtctcgaagtcgacaatcctttacgaagggaggagagcgtgatcggaatcaccttggcgttggcgtcgtgagactcagcgaagcgatggagctcggcttgtgtggccgtaatttgtccacgctggatatgagccgacagatcgacactcccgtcgttctccaccacactcttgactcgagaatcgtcaccttcgccgcttttggtccgcagccacgtactcagagtctgcgaaatgtcggcaaacgacggacgctgctcgggatcggcatcccagcactgccgcatgagctgctcaagccctagaggagccggcctgctgaagtcagccggtcggagtccttcgtttgccacctggagagggacttggaaggcgttgaggttgtcgtaggggtccttacgctccaccagttcccagagcacgatggcgtacgaatacacgtccgctttctcgtcgtagggctcgtgtcggatcacttcaggtgccgcccagaacggcgttccaacccaagtatacggaccgtattgaacacttcggaagcgcgcgagcccaaagtcggacactttaacgacgaggttctcggagagcaaacaattcttggacttcaggtcgcgttgtaatacgtcacaagcgtggatgtgagccatccctaaggcgatatcgtatgcgctggtgactacaagttgatgcgggaaaaagttggcagcatcgcgcagataatcatacagcgaaccattgggcatgtactccatgatgagcacgtagcaactgttcgtgaggcttgcaccgagcaacttgacaatgttcgggtgcttgagtgcgttcatgacccaaatttcgcgtcggaagttcttcaccgcctcctccaagttgtcgacgacgccctctcttggcatcagaagcttcacgccgactttcgtatctctccagatagctgcgtatacctcgcttaatgggcccgaagctagccgcttgacgagatgtacctcgcgcagtttgacctcgtacactgaagcctggtctcctcccacttcgaactgcacgtgtgaactggcaccgacactgactcgtcttttgtctcgaagctgcatgctggcgcgtcgctcgttctcagctcggtattccggtgacagccccgccatcccgttcttcgtcgcgtatgaaggttcattgaagaaatgcgcctgggagttcgtacgcaccggtgctcgcttcttgaagaactggaactttttcctgaacgagttggagcgggatcgctcagacgacatggagtccgtcgagtctgtgcgacttccgctcactctcttcggaggcgaaacccctgctgcagctgccaagatattgcgtgaactgcgcgcgacggatattgagacggctcggactttctcgctgatcttggacttaggagggttcatggcgctccttgagcgttgcctggccatttgagctgagagcatgtgcttgctggggtctctcttcttcaccgcgattgagccagcacggacaagagcgggcttgttgggacaagcagaaggcgcggcgctgccatcatcctctggaaacacaagcggtgggatcgctgcttctgcctgctcgttcgctccgtcgtcctcggttgccccagtggactgcgctgcaaaatccaggtgcatcattcgctgcgtctggagcatgaaggcttcgccctgctgtggcgagttcttgtggccttggatgcgcgcttcagtggcatctttcttaatgacagccagagggagcggcgacgtccgcccagccactctgatgccacatttgcgcagcaatcgacgcacacgccacgcgatcccgcgactcgttccggtcagcacccggtgcaccaacgagttgtttcgagcgtcattcgcctcgttgctgctcctccgtcgtccacacagccagcagcagcgtgaaactagcagcaaaccacacaccaccaagacgcagcaaaaacacaggaacagctccagccacgcgtccacgagtacgcacgagtttctgcccgcgcagtaggcgcgcgagaacacctcgagcgtgcccatgatggccgtccgtcaatgccgccgcgtctagtgataaataaaacgcgcgtgcaacaacaccctcccagagatagatggagggctgcctcgaaatagcggtcgtcagagcaacttccacgtcgggaggttgtgacctggaaattcagctgcgctctttccagtacggacgataaaaacctgaaaacttttggttaatcgcccgaacgtttagcttcacgtaccaagagcgtgaaatacatcgccacaatccagcccaaacgtggtgcagcaatccagcaagttgatctgctcttctttcaaaacgtatccttttaaagatacgttttactgggatagcaggtcatgctgctaggcagcccaaatcgggttagttcggaccccggtaactgaggccggtaaactgaggccagccgcgtcaatgcttgtctttctgcattgtgatctcgagtctacgtggcggcatggccacatcaggttcatcaagtgttgttgtgtagggaaagcttcgcaagcctcacccccccgcagacctactttgactatacaggtccccgttgaggggtgcacgagtaattccgtgaagtccgcggactctccggaaatctcctccaggagtcaagtctattaaatagactaataaaatttaatttaaattttaataccaaagtaataccggtatttccaaactgcaactcaatcagaggggaattctctggaatagttaacggagggagtcactccgacccaaaattacttcaaattcttatacacagaacccaaactaacgctacttactcagaactaagtcaaacttatttggaaattaatacccctgttatataagaactcatctggatacgcgaacccaatatagcggcttttttctcctaatattacatacttgttatatccgttcgtatcgggaatatagtctcatacacggagcgtttatactagccgtcaataacttataaccgctgtacaaaggatgcaaaatagatggatgttgcttgaggcggctaagtgcaacatcatcggtaaattacgacggtccgaagtaatttattcgtttgaatgtcgtccgaagagcaacgcctacgctggaccaaatttcgcatagcttgtaagtaactagattacaggcaccaactgaagaggaacgctattgggcatgggttagttgcagatacagacactttacgaggcgagactagaaagcgtcaacttggagctagtattggtgagctcatgtgtaatgacatcattttctttttaaatttaatatggagtttcgctagaaaaaagttgaagcgagcgactggtgcggcacaggtgtggcgcgcctaagtcgcaaagaaacaagttagattttttcgcacgaattgcgcagttttcacttttctacgtactagctcggggctgttatataatctaagtgtgtaagtaaataacatcgccgcttaattttttaacccgtaggcggatgacaggcacgtttaccaggtaggaaaatccaaatcgacctccgtaaagttgcctagcaggaagcaagccttagcctatcaagcgggaaacccacccgttttaaacttctagggaggtccgaaccctacgagcaatgctgcacaaatcatcttaccatcgtggaaatcagtaaattacccacaatggtaaacagctccagaaacacagaagcagtttgttttccacacaatatcgtgcaaatgttccgattttgaggtcagatttgccgaattcggcgtcgtttttgagatataggccgttcaaaaagtgctctcgaatgctcattctcctgaattcgtgtgcgtctgacctcatttttgtatgaaaactgtaatgggtctaccttggcgcactactacggcttacacgtatgcgcacgtgtatgaggaaacgtaggtttcttttacttgagttaagtatactcgagatccacgagtatactttaaacaagataaagactccaagtagcgtgttttggtaaaagatgagaactagtatactttaaacaagataaagactccaagtagcgtgttttggtaaaagatgagaactgctatttttgttttatgtttctgacttcctcttaatgtaatattctaaactaggaatctgccaacggctggttggcaggattctgctaacatgcaagtcactcatcggctaaaagatgctgctttcagccaataggaatcctaaatgtgtatggaccacccgtcgtggtggtcgtaaatgtatgtagccattggtgtaccttacaccaaggtcgaggaagtgttcaaacctctaacagacatcgcatctgttagagtaacaagtgactgtagccacttgtgcgtgtaaccccgttacaaaaacttttgcgtttcctgtgcgtctgcgcgcacgcgaattctttttgcccattgcgacctttccatacgaactgctgttacgctgggagaaatgcagactccttacaaatttgtgtgcgtcaaacgcacagaaaaactactgtgaacctcgaaactcaataccactccatactgatcggagcagtaagagtcttgctgcaagacaagcaacgggattaatcgctagatagagacctctgggggtgcgcgcggatggttgtgggctctatctcgagacgaccgaaagcgtttgccgtgctcacaacccccaaaagtttataaagggcatactggcagccgtgtcctgcattagcgcccagccggcgtcgccagagcgcaacatcaatccttgtgctattgcatccacgctagggacggcacggtcgtaacaaggatgaaagttaagacgagttgaactaggatgaaagttaagacgagttggtaagtctctaattaccggctcacacctgaggggagattctggctgcacgaggagcttgcgggtggtttgactcataccaccatgtgagtcgcacgacggtgcagagcttgctgaaagcattactgcgtgccgacagcctgcgtatcgagctagagcacccctattagcgaccaaggagaatggcaagaagggagacgcgaagaagcgcatgttcagtgccgtcggacatgtacacgcaggatgggaggaccgtgtgtggacgttaccacttgttgggctgcagcagaagcaatgttcctcaagctgagacgcaagctcgtgagcgcgaagtcgtcacaactccaacaactccaccgctcgcacgcactcgtccagcgaagggcaaacgaccaggacggtgctccctcgtccggagtgcttgcccaatggcaagttcgccgcctcgacctcgccgcccagcaccactgctggcaacgtcacctcatgtccaagattcagatgcgtccatgttcgacgacgcaccgtcggacgacaccgtgattcccgacaacgagcctgtcgagtccgtgtacacacccagtgatcatgaacatggtaggctgtctcttatactgtcccttatgctgcattgtatgctgaatgttatgatgaatactatactgaatattatggtgaatgttatgcagtattctgctttatactgctgcttaactgtaggcgaccacggcgacgacgaagaagcggaagctggtgcattcggcaaggagctactgaccgacagcacggacgcgttgaatgttgtggcggatggagatagcgcgccccagtttggttccatggattctggcgatgaagcagaagaggatgatgtcgagactggcgagtacgggtcagacgaggatgtggacgcttcgtgcgcccctgatgacgtcgtcgacgatcccgagtagaccgagcaagagatcgcagcggaggttctcttcgcggagaactttctgtcgcagtttggtgggaaggacgaagtgctggcaggtaacctgaagaacgctatcttgcgggacatgagtgcgacgggttgggaggacatcgttcagcctgacacctacgattatctcatgacgccttacgagcctgtcaatgatgccggaagctaccccgctcttcgtcaaggttactcggagcctactgctgaggtgcttcgaaggggcgaccccccatcgctctattcttctacttcatgcccgtcgtgctgtggcagcacattactgcctgttcaaacgagtatcatcgcgagatgctccctcttcgagcggacgaagcctatcaccaccatcgagccaatcgacgactcaacgacaagttgccgaagaaatcacggcgcgacatccaacacgaaatggaaggtatgaagcccatcttgccacatgaactgggtcagtttatggcctgctaattgccagagctattgcgccgaaccgcgagaagctggccaaccactggaagaccacggatgagggtgatatctcgcgtgggtgcttcgggtcggtgctgccacgggatcgattcatggagatctttcgtagtctacacttcaaccccaacagcgaccccagagctcaaaccgaccgcgcctggaagacacgcaaggtcgtcgaagttctgcaacggacctttgcgcgtggatacgtcgctccatcgcacttgacgtttgatgaagcagtgctgccaagccgatcttcgttcaacaagatgcgcgtctacctgaaggacaagccccacaagtggggcaccaagctcttgatgctctgcagtgcagtcacagcgtactgcattcggtacggattttttttggttgtgtaatttcattacattgcattatgcagtttaatcttacaaatatgtcttgtttaaactgaatatcgacgggtttgagatctactgcggcaaaaagcagcacgcgagtgatgcagacatgaccgacatgaagcctggaccagcggcggtcgtgcgaaatctgctggaagtgtttggaccagagtcaaagaagcagggtatgaggctggtcgtggttgaccgcttctatacatccgtggccttagcgattcagctcctgctcatggggttctactgtgtcggcacgacgatgacgagccgactcggctactgcaaggaggtgatcgaaaagaagaagacgcgcccgacgagattgcgcggggctcattcaaaattgcaaagtccaagctggttccaaacatggctgccatcagctggtgggactcgcgtcctgtgcatttcctgtgcaccggtggcagtcatgagcttgatcgtgttgcacggcaggacggcgcgacgcaggtggaggtgccttgcccccgcgttatcaaacactaccacgccttcatggggggggggggggcgtggatgtcaacgaccagctgcgcctgcagcgctactcactgcagcgagccctccgcttcaagaagtacttcaagtcgcttgtcctcgcccttatcgatttggccatcgtgaatggctacatagttcacaaggcatatcacaagaacaagtcgtcccgcccgctcacgcatgtgaagtacatgcagctgtgcaatctcgacgccacggacatgtaagaggacaacacgttcggcacgcagcgccgcccggaggccccctcgtacgagcccatttcgactggcggaggccagacgacccctcacactgctcgccaagtcgatgagtggcacaccgcagatacccaagcgaagaggcgacagcgtgcttgtaaggtgtgttcggtggtgcgtacggggacacagcaagcctcgacgactacgtacttctgcggcgactgcaatggcgccggcccgatcttcctctgcatgcgagcccgtcgcaaagtgcggaagtggctatgacttactgggatatttggcacaaggagtggtcaaacggaaaactgattccggttgacaacgcgagaaatattcaagtgagatgtggagtagcgccctcgcagaaatctcgcgaacgcgatctcgcacaaactcggcgcgtctggatagcggtcgcgccgagcgaattattcccggttgttggagtagcgtatcttcgaaatacaggcccaagtcttcgcaggcttcggagttggggggttcttgtgttgacgcttgttccttgtcgtagggcgtcgagccttgggcgtgtggcgttatcgggccggcgtttcctcggcgttcccgtcgggcgtgcggcgttatcaggccggcgattcctggggcttgtgtggcgttatcgggcctacacggggggtcttgtgcacggcggttatcaggccagtgcggtccttcgcctaggcagcgcgttatcgggcgcccacccaaacggtatacgtttaacgtgtttgttccagcacgggtctgtggggggtgagcacccgaaccagcaaacgacggggggccgcgatatcgaggcggctctacttgccggcgcttggtggttcccctggaacctcggagaagacgggaggtctttgtggttcagagaaatttcggcactgagtccttaccctacccaatgtccttgctactggctactctgtactactgcttgctaagcctaccgttctgtgcctatccttacttctgtcgtgcttgcactaccgtgcttcaatctgatttacgtggcgcaatcaagatcttacctcggcgcgttttggtcggcgggggttacggtcggcgcgttttgctcggcgcgttctgctcggcgcgttctgctcggcggggtttagggtcggcgcgttttgcagaaccgggcgcgctggtcgacccgtcggatgattacgcgtcgcactggattctggcaccgtgtctcacggcccatcatccacgccgactttcccgtcgagctcggccctgcgtcgcgcccatcaatccgcgtcgcgttccatcagccgcgtcgaggtccatcactcgcgtcccggcgccttcttcctccggcgcccggcgcgcccacgtcttccgtggggtactacaccacagtgacgcaagccaagatcggctccaccgggcactccgtcgtcccctggcatgccaagcactcctgcttcaaccaagcaacgcagaactagtccacaggccgtaagctgaatattaggctgcacctaaagctgcatatatgcatcattgacatgattacttgttttgcattcgtaaagcgcaggattgcgtgttgctattgcacatcttgacatgtatcattcgtgcctttcttttatcaccagtgtgctgctagacgtgtgttcaagcatatgctctcactgtctatttctttcatttgggttttgtattgacactgattgcgttagatgcagaggtgacacaccatctttcaataggcaagtttgtatgggaagtttgaatttctgaaattttgaaaaggagaatgctggggtctgtcggttctgttcggtggatcagatctgttgccctgttcatttcagcgctaaagtgcataatgcaacatggggtagctactcaaagccactatatgcagtttatatgcgagttaagcacatctttgtaactggcctgctgctagccacagtcagccctattgcagcggggctgccgtagcttcttgcgtagaggaaggctttacgactcaaagagtctaacaggatcctatccgaggacccacgaaacaagtcaaagacttcttggtaaaaaatgaaaactgtcttgaaagcttattgcggcagcgccgcctactcctaatatctatggctgactatctagcaagtcagccctacttgtatgcagatgactggcccgcagaccatggggtactctgtaccgtacccacatggtacacttgcaagtaaccccattacacctatcccatcatatgcaaaggacaagtctaattaagctggatactgcatatgaaaacatgaaactttctaggctccggtttgggggggctaatgtattaaggcctaattctaaccgcgcgccataccatgtcatgtcatagggctaggtaccaacattgcgtggcacttcgtttccgaatgaaatggcatgcgccacggcaagatgaactggtggtatacgcgcacaatttagcaccccgtggaccataagcggattacatgagttcctaattggtgtatgaactagtatataccagcagagcaaagtcggacgcccgtcgcgagcaatttccccattatgacacatggcacgaccaattgccatggcaccaaagcgtgccatgcatggcactttcatggcaccagttacctaaaccttagtaactctcgttcaatgaaaattgacacgggatggcatggcacgaatggcacgcggttagaactgggcctaaggaatcgagttgtatgcatgctgtaatcgacctggcacagctaaacgagagcatgaacagtactttcgaggcgtcgacataccaagtcctgctgcgttggcgacgcaggttcttccgttgtacactccgagggcacgataatagctatggggaacattcgaaggatgtcccggttcccggatagctcattctcgaattcgccctcgatcgatcaagcttccaggcctaccactgtactctcgcctctttgccattttctcaaacagccatttcgactccaacagttattgccggaacgatcgcgtatgtcggcccttcacaagtgccagccctggagtgcttctcgtacttattggtcgtcaaagtacaaggtgcttcagcgctggtacgggtcacgggcactgacccagcgatagcagcccggagttcgacatgaagacgtcagtcttacgccaccgcatcgggaacgaagcgtatggcctgggtcgtacatcgctcacccaatcgcatttgtgcagccatcaggcgactctatcgaccagtgggcgtatggacttgtgactggctacaacatggacagtggggtggccagccaccacatccgtaccgagaacgacagccgccaactcggactgaccggtccgtcgaccgtcattgcggtcgatcgcctcaactatactcttcgcacaggagcaacggtgaacgctatggtgctcaacgcgttggagctgatggaccgacacaacgaggtgacagtcgcgtgtggcaagagcagatcaggactcccagcaagcgtcacgacaacaatacttagatggcattcacaccggacgaacgcgtcccgttaattcgaccggacaccctggaagtcggcacgtcaggcgtctgcatgttgtggactgcgagctcactgttcgcggaatcaacccttcggaagttttcaaggatttgtagtacacgacgttcctgacatcaaagctcgcactaacccgaaggctggattaactaacgatgtagatctaacctttagtgactcagacgacgaaggtaaaaccgagtcagccccggcggagcaggcatacatcgagctggtgcgcttagacaaccggtctctgcgcaagcgggccacgatcaccgacccaaggcaccaagacctgcaactactggacgacgtcgacgtcccaggtcgagagccgctccgatgcccacaagcccgcgcttctgtcgtcggaaatcgagcagtatgtgcacaatgctatcgtgcacccatccttcatcggtaagaaagctcaagttgtgctcgaatcctcgcagcaaggaccgcggaccaagtttctcggctgtcacgtctgtcgcacgacctcggttttggcgtccgagggctgtctcgcatgcatttccgccgattctgtcaagaactcgagcaacaatcggccgtggacgcggtggacatgaccaactttggcaggtcgaacgcactccagcccgctacgccaccgaataatatcgacgagatagtcgacgcattcaaaacgctgctgtattttgcggaagggttctacaacagcacagtctacaagtttatcaagtccggtgccgactttatgaagcagtacgcgctgttcacacgccccgacgcagctacctgtaacatgctggtcttctggaccaactcgaagttgggaaagtttcggacctggcgacgcgctcttcggacgggagttcacacggaatgacgatgtaacggggttacacactttctaacctaaatccgtaggtgaatcactacacggactcagagccactgattatgcatatgactagggttcactatgctagatggtgaaccggatacatttataccgtaggcggcttggccgcgctaaagggaaatacattcagtttgagatttacacacttaagagttaagcgttaactcttggagtccgtaaggtgtacggactcgtacgttctggtgttagaatgatctatcttaagctgagactctgtgagtctgttacgtcttcctctgacgctaaagctacggcagccccgctgcacttggtagcactcgtagtcaatccgacacttgagtctgcatagactggccctctgtggagaatggagcagttcgctcacttgcccccgaaccagcaggatgtgcttaaaacgtctatgtccttgctgggcccggagggcggacgcaacttgcgcagcaaggccccgatgcggtgaacgcgcgtctcgaggcgttttcaagctacgagaatgctcttctagagcaccaccagcagaggatggcgactgccgcggcgccccttcgtcgtccgacgcgggaacaagacccaagccgctcatgttgagcgtgaagaccttcgaaggcaaagagggtgaaaacttgatgctttggacccgtgaggttgagatggctatgagctcagctctactccggacggagccaaagcgcatggcactagatatctcgaagctcggtgggcgagcgagagagtgggcactaacgtccggcacgtcggtcgaggtggccttcccgatgtgggaccaactgaaaccgcaattatcccgagtgttcgctccgcctaacgaggcgtatcgcgtgcgctcacgcttcctggcgaccaggcagaacaagaaggagttgatggactacgtccaagaggtgagaactctcattgcagggatgtctgctgacccgttgccagaggcagtcaccgttacggtgttcatggagggcctccgcactggcgttgccaggacggaggtgttccgaacccacccgagctctcttgaagaggctgtgagcgtcgcattgaatgcggaacacaactttaagtcgtcgagacttgggtggaatgcgtcttacgctagcgcgtcgaatggtccggaacccatggacctcagctatgctgaagacgaagaagccgagcttcgtgctgctgagcagcgtcgcggtatccgcagatgcttcatctatggtgacacccgtcaccttcgtgctgggtgtccgctgcgccatcagcgcgaggcttcgtcgcttcgagttcgaagagcggcttgacgaagggctctggtttgtctcggtgaaacgagaagtcccagtaggcgcggagcggcctactggggaagaacgaagttctattgagcctcggcgaggtggaggtcgacaggacttagccccgaagagagccgtactctctaacgcggaacgtgcatacaagccgggcttgttagtcgtccaagcgtgggtgaagggctttgcgaagccatggacgattttaatcgattcgggagcgtcgggtaactacgcctggcgttccacgatggtcggaagtcagctttatgctgaggcgctggtagcgcgcgggagtgacatcgtcactgttcgtctcgcgacgggcactcgtgtcacggtgcctaaggtctctgtggacctgggcgtgaagtttttggattttgatagcgtggaacgctgtctggtcatagacctcgattcgagatatgatctcatcctcggtatggcgtggctggaacgccacgagccttggatcgattggaggtcgaagacccttggtcctacgcacttctctcctggcggagcattgacgagtcatgaacccacctctgctaggaagcagaagcgcttctggcgcgagcactggaccgagtcggtcaatgtgctggacatcggagcttccgagttggtggacactaagtgtgtcgagaacgagcgttccgagcgtggcccgcggacggcaggcggagcggcactaattccgctgagcgggcgtgcgtctgagggcgacgccctgctgcgtgccagcgacggtgcggtcggcacgatgccggagaacaaggggctttacccagatgaagatcgtggagtggtacgtaatccactgagtggaggctgcggatcgtgcagctcttcgctgagtgtcggtaaagacactggagctcctctggagccgaacgaggtggtgacacctggcatcaagatgcacgcgaaatcacggagatcttcagggcggacggtgtccatgaagaggaggcagcggcgcaaagcgctgggtgagagacgcaaagcgtctgcgatctcacgagtcgagaagggtgtgtcgagcggtgaggcttcacgcgagagcgagcagctctatacactcatgaatggagtggcgggcgacgtcgacggaggcatcaacctcgacgacttgccctcactgtctgctctcctggagctggacgagatgtcgttggccgaggatggcgaagccttgaaggctggagacttggctgaggtagtggtcatacgacccgaagaagagttgaactcgtcctcgcttatggataaagctgtcctgtaagacaccaagaaggcactgaatgcgcggagcggatcgacgatcctgaaggacccgtcggatcccttgtatcaagtggtaatggattaccaggacatagtcttgaaggagccgccctccggatcgaggtgttcgactcggtctcgttccgggaacgaagtactgcgtgacgaggcagtgacccttgccgaaggagcagtgtgacgtcattgacgcgttcttccgtgcgaagcatgtgcgtgagagtaagtctccacactctacgccgacgttctgtgtcagaaagccaaatggcaagtggcgtatcgtgcatgctttcaacaagctgaatgccgctaccattccggcgcagacgccgattcctcggaaggatgttcttcagagcaacatggcatgatgtacgatgtacagtgcgctcgacttggtcgatggatattaccaattgctcatgaggacgagcgacattcctctcactggggtgagtactccgagcggcatgctctgggtgtggttggtgatgccccaagggctttcgaacgcgccagcgacgtttaatcgtctggtgacgcagcttttcaggccccatcgggcgtacgcgcaaacgtacttcgatgacatctttgtccacagtcgtgcggagcacggaaagactgatatggagaaccatgtggagcacctgcgtgctgtgctcgaatgcatgcgccaaaacaagttgtacgccaacattgacaaatgcaacttcggagcggaagagatccccttcttagggtgcttcatcgggaagcgtggcctgagggccgacccggtcaaggtcaaggccattgttgactggccggttcccaagaaccagaaggatcttcgcaagtggcttggcttggccaattacttgcacaggtacagcgagaactacgctgagatggctcggccactctccaatctcctgaagaaggatgcggagtggtgttggaacaccgagcatcaagatgcgttcgcggccattaaggacagtctccttcatgcgcctattctgcctttgccagaccccgctcgtccgtttagtgtcgtctgtgacgcctcggactttgccatcggctgtgccttgctgcaagcagacaccgagggacgcgagcgcgtggtagcgtttgaatctcgccaggtgaaggctgcggagaagcactatcctgtccacgacaaggagctacttgcgatgaagtatgcgctcgttaagttcagggtgcacctgttgagctctcagccgtccgtaatatacacggatcatgcgtcgttacgcactgcgactcaggcgcctcatctctcgcaaaggatggcccttggctgtccttcttcgcggagtacaacttcgaggtgaagtacaagcctggcaggcataatgtccttgcggacgcgctgtcgcgcaggccggattatgcgttggctcaggtaacgaaacgtgacttcgtcattaccggatcagatccgaacgacttatgccaaggacgacacttatgtcgcgttgctgaaggctctggggagcaaagagttccaagactcggacatggaattgtccgcgcggctgcgcgcgcggctacaccgttattccctcgatggaggcctgttgttctacaacaccgaccccgaggatacgccccgcgtggtcacccctcatgatgaggatctgaagtaccgcatcctctatgaggcacacgacgcgcccttggctggccatcttggccgtgagaagacctacagctcggtgagcacctactactggtggccgaagatgtacaagtggacgagcacttatgtgcgcacgtgcgagacgtgtcagcgcgtaaagtcctcacctcatgctgcagcgccattggcgagtttgcctgccccttcgagctgctatcaatccatgagtacggactttgtgtttggcctgtctgcggacgcggcgggtaacaccggagtcgtggtcttcgttgaccgtttgaggctgtgccggataccatcgatggtaacggtacgacaaggctgttcttggaccgagtgtttagacaacacggactccctgagtcgattgtctcgggccgagacccccgcttcacaggcaacttctggagcgcggtctttgcggtgtttggcaccaagctggacatgtccacggcgggccatccgcagaccgatggtcatacagagcgcgtgaatcgcgtcgtcgaggacgtgctccgaagcatttgcgccaagacgccgaagcgctggagcgccatgcccccactcgttgagtttgcgttgaacaacgccgtgcacgcctcgacaggctacacgccgttctacgtgaacagcttgtctcatccccgcgtcccgctgacgccgccgcgtggtggcctcgggcttggtggaggaggagaagccgacttagctgatcggctagccgatgtcagcccggctactgttcgaaaacagggtgacgctttcatgtcgacgcgtctcagtgtcttacgacatgtaattgctgaaagccaagacaaacaaaaggaacatgcagatgccagatgcagaggaaatgttgaaagttatgaggtcggggacctggtgctgtttaacgctaagaacctacctacacatgcagtgtcagccgtcttcaagacgaagtcgcgcccgcgcttcatcggacctttcaaggttgtggccaagaagggcactcaaacttccgaagaagatgcagacacacgccgtcttctacgtgggcttgctcaagccgtaccaggacccgatgcaggtgcagacggaggcaccaagggtgacgaggtcacaggcgcggaggtcgcggtcgtcgaggacgcagtcgcaggcgtcgaggacgcgaccatcaacgcgggcaccgcaggaacaggcgaaagaatcggcatcggaggtgccgcgggcacagcgagagccgcaggcgcaggaggcgcagcagtcggagccttcatgcgggccaggaggtcgagctgaccctgaagcacagcctgctgacgctgtagctccccgagctcctggccacgctgctcatcgcgatcgcgatagtatcgcacccagccttccaggcccccaaggggtttccagacctctcgaggcacctcgatccatcgcgtccgctcggcgagctggtcgagttcagtgacagtccggcccatatgcgcatcaacgtcatggatgtgatcccgaaggcgggccgcctgctgccgcgcctgcaagagctcatcttgaagccccacagcggcctctaccggctctgctcgatgagcatgggaatctgcattaccgtgtggagcgcctcctggcgaagcggcggtgccggggtctaaaccagtatctggtgaaatggcgagggtaccctcactccgagaactcataggagtttgaggtgcccctccgccaagactgcccagacgtcgtggacgcttttgatcagcttgatcaccagcgccccgagggctcaaggccggcacgccggccgtcccgcgcttcccggcaataagccggggagatgctgggtcagccacattgctccgaagttgaccctgaaccacagcgctcactccctcgtggagaggagcggctggagtgctcgaaggagcggagcgcgcagcgctaaactgggcctgcggctgggcgattgccgagaggctgctcttggctcggaccttcgcaaagtcgaagcggagcctgcgttcaatgcgaacatccacttcgctgaagctggctcggagagcatctgtggtgtagtaccccgcggaagacgtgggcgcgccgggcgccggaggaagaaggcgccgggacgcgaatgatggacctcgacgcgattgatggaacgcgaagcggattgatggtcgcgacgcagggccgagctcgacgggaaagtcagcgtgggtgatgggccgtgagacacggtgccagaatccagtgcgacgcgtaatcatccgacgggtcgaccagcgcgcccggttctgcaaaacgcgccgaccctaaaccccgccgagcagaacgcgccgagcagaacgcgccgagcaaaacgcgccgaccgtaacccccgccgaccaaaacgcgccgaggtaagatcttgattgcgccacgtaaatcagattgaagcacggtagtgcaagcacgacagaagtaaggataggcacagaacggtaggcttagcaagcagtagtacagagtagccagtagcaaggacattgggtagggtaaggactcagtgccgaaatttctctgaaccacaaagacctcccgtcttctccgaggttccaggggaaccaccaagcgccggcaagtagagccgcctcgatatcgcggccccccgtcgtttgctggttcgggtgctcaccccccacagacccgtgctggaacaaacacgttaaacgtataccgtttgggtgggcgcccgataacgcgctgcctaggcgaaggaccgcactggcctgataaccgccgtgcacaagaccccccgtgtaggcccgataacgccacacaagccccaggaatcgccggcctgataacgccgcacgcccgacgggaacgccgaggaaacgccggcccgataacgccacacgcccaaggctcgacgccctacgacaaggaacaagcgtcaacacaagaaccccccaactccgaagcctgcgaagacttgggcctgtatttcgaagatacgctactccaacaaccgggaataatttgctcggcgcgaccgctatccagacgcgccgagtttgtgcgagatcgcgttcgcgagatttctgcgagggcgctactccactcatccatggagctgagcttccggctgtgctcgacccaagactcgaactgagcttcgtactcaatcgagcctttccccgggcagagtaccaccgggtacgtccgcatggcggacacggacttctgctgggcttgccgccgcagcctctcgcggtactctacaacagtcgtagactgtggagtgaggagtcgctctcgcgagacgtacgcagtgcgagctcctccggagtacgggccgcgggcccaatggcgtgcagcgcgagagactgctggaacgcctggcgacgaggcggcgaataccgtggctagtgagcgcgcgcagctcgtagagaccggaggagcgttcagggaacgggcatggagtccgcagcggtggccgcggctcctcccgcgccggcgcagcgcgctctgcaggtggacggctcggcgatcgcacagaagacgtgcgcgcggggcgctcttgatcgtgacggctcggagagccaactggggccgacgagccttcttcacggcgtgtcgacggcgtgggcgaagcgtcgccgcggcttggggagcgtcgcgtggatggggacgcaatcttctcggatcggagaaccctccatggactcgtccacttcgcaagagttcccggggatccatgatcagacgggttggtgctcgaggggagctggggcttgcgcgctgcgagctgcgtttcaggcgttgcgccgcgaaaacctcgagcaccgagagcctggaaggcgtcgggggtgtgcgcgcgggcgctggcgttcgcgaaggtgcgggggcacgcagtgcagcagcacgagaggagcgaggctccgaggcggatctgtctgcggtcgaaagaccaaaaggctttatgacttgaagtcatgtgagggcgcgttgcgccgagaagttctcagaaaagtccacgcgatgtggattgactcgttcgagaatgaggtttgatggaacaagacccggagattgaccgttaagcgtgtgtcaacggtttagtgggggagggtgtgacggggttacacgagagttacccgaagggttacgaagtggatacacaatgtctaacctaaatcagtaggagaatcactacacggactcagagccactgattatgcatatgactagggttcactatgctagatagtgaaccggatacatttacaccgtaggcggcttggccgcgctaaagggaaatacattcagtttgagatttacacacctaagagctaagcgttgactcttggagtccgtaaggtgtacggactcgtacgttttggtattagaacgagctatcttaagctgagactctgtgagtctgttatgtcttcctctgacgctaaagctctggcagccccgccgcagacaatcacctgatggacacgaccgacaaatggtctcgctggtgccgctcaaatctagccgagcacctttcagcaataacacgactcagcaacggcaagtacgaagtcagaaagtgtcagccgtctcgcgtgagctgctagcactgttgccgaaacaagcaaacacgtccatgtgtatgcgctacctgtcgaagaaggggtgcatctgtccagcgccaggacaatgctttaacccgagcagggcccacttcaagcctctcgctcttcccgccgacacgaagcagttcatcgacacgaatttcctcggcctggctacagagtttcaggacttgtgacgccaacagccagtggcagcacaggataacccgggagttcagaatactcgtatccatcaacacgatgggccggtgacttcagttcaatattcatattttaaacagaaccagcgtgctgctcactcacttttctataagactcaactcgggctgcatcgcacaatgaccgctgcccgagaactcggatatcggaattttgctgctcgacacaagatggagctccttgcgcagcagccagtgcaggtcggccagcttcacgtagaccgtgtcaatgcagactccgagctcacccgacgctcaggtctttcactggctcaatttgttcgtatctatcgcaatcagatctcggatgaccccaggcctaacaaggatctattcgagctacgcatcccagccttcgagatctgacggcacgatggaattcagtcgttcgcgacggcgtccaaccaaaatggaaaacagcaagcccaagacacaataggctcgactatcaaaccaccagtccatgacgaatcaccaccaggacgtgctccacgacatcatcaaaggtcaacgcggtgggcgatacctggtggtcgaagcagacctgctggatcgctggaccaacatcttcgtcagtccgataggaacggtggagaataccactgggaacaggcacgatcaagtaattacaagagttgccaggttagccctagccatcaggttgttcagcgcagcatgcacaatcttctcgctctcgttaaccagcgctctcgtggtctcatccagcaccgaaatctttggctcgtgtataatggcacaagcaataacacgcactgcttctccagcgtgacgtaaggagcggtgagccagtatcgcccaacgcgtcgctgtcgagccagccaaacgcactcgtctgtcattcacgtcgcagtgcataaatacgagtgtaccaatactacacgggcgttaactcgccgaaccaactgttgctctagtcgtcaacctcgacactggagcggttagagcaacaaggaggttgcactaaagggcaactttagtatcgttttttataactaaaatatatcctttggttggtcgtcgtcatcgtgaacctagtatagttagggggatttaggctttctgcgggcccgggtaatgtcaaatatagcacagcgtacggacgagagggaaagagcggggaaccaatatagcgctcgacgcgcgtcgtcgtactccacccggcaaaagaaaccgaacggtaaccggccgcctctagccagccgtatgtcaaaacgtcttggttgatcaagggggtgcatttttttgccttccattttggtgggttttacatgatgaaagataattcaccactaaacctgtgaaaagagagcaaaatgcactcaagctctgatggctagcctcgaaatcatgtttcagcctttcgtgtcaagttgtacaggctcaaaaccatgagcttagcaagcatctagctagtagcattaggacaccgctcggcgaagatgaaagccatgttctctaggttgcctaggaagcgtacgattggtgccagcacgtccagtttgcgctttaaacacggcatgcagctcttctcgttgttgaatcgagcggtcaatgttgaatcgctgtcccaaaagcttcgccgcgaagcgaggtacctctagagatttggaaacgtgtgctggtcatggataacaatataacaattaaacaatacaaatacaggagatgctcgccgcgaactaccaaactgttccagcctaagcgaagatccattatattacagatgtagttgtcatcgtcccaaatgatgtccaacatttttgatatcctgctacggagcatgtgacttttcttcctcctcatccggagcattttgcagcattacattgcgtgggattcggtcagcttcgctcttccgttggttgagttgggcgctggctaagacatctgctcggagagactgatcgacatatcttcagcgagccagcatcttatcgcgtcgccatactctttgtacgtattcatttggccggccgcccaacccggatgcgtccgtcaggagcaattttacgtgtcgcttctaattcctaggtacaaattctcgttatgaattttgtttcgttcaatcaaaattgtaggtacacgtaccgagtttctttcgaatcgtctgcgggcaagttccaagaaaaagaaggcgacatcttttcttatgctgatttccgcttcctggttctagactcgtctcggtgcaaccctaggatacggtatcaaattatgctttctgtgtactcctgcagtaatgcggtgcccagcacgccaccggagacgatcatctcgccgctcaggagatcttcgaccgcggcgcgtggaacacaaggctgcgcctgaccggtcgttgagggtgcgcgctgagatccaggtcggtaggcttgatcgcgagctctagaaaaaaggactgaagggagggcgcgcgccgcgtgtcggcgactggtatccaccaaagttttaatgggacggacggtgactgcctattggctgtagcgagtttgctgctaattgaccgatacgatagtcaataacaggcactgggggtgttagttgtagctgaacggcttccaaatgtggtccctttgcgtgggcgccggtaaaaattaattaattgctcgcattgctcacggaccaaaatgcataaaattatcgttttcctcgtccaatggtccctagcggcgacttcctcgcagctatgagcatcgcaagaatattgttataggttactaaagcacttgtataagccacatttgccgaataggaaatattgatagtcacaaaatggacaggtgaatttgaagataacttaagcagaatgatactttacggcacagccccagtaataaagacaccgcacgcatttgaatctatgggcattgctaacggcaggaaattgttcatcacctaccagcggtatcgcactcaacttaacggaaagcaaaaaataattggtgaacttttaaatcccagtcaatcttgaagccgtgttgatgtagcgaaatgttacaggtaggcgtgggtagcctattcaacagtttgtacaagtcggtttgtttctacgatgcatggatccacatttagtaaaggctccgcatgagagatcttgtaacctggtcaatagggttgtgtgtgtgtctctctctctcaaatttgtccgttcttattgggtcttacagctctagccgatgcgccttttcgagtgctgcactgcggttctggcggtgcctcgaatattaatgtcatatagcacatgaatggaagacccccagaagttgcacggacacgatctatatctcatgctcaccactcacctgatgcaagcttgcgcgtatctgtgcttgttgttagcttattgagtgagctgacaaggatatcctcttctgttctgcgccgcgtctcgccatacacgcgtggaaccgtagagattaaagacctcaccacatccgcttggtcttcgtttgagatgtctcgagaaaaacgcaatgaatttttagtcgagtatagcgagagtaatccggtatgcgacattgttcgagcgcgccacaccagcttatcatcgggctaacagaccgttgcaaacgccttacagttctatactcgctttgacagagtgtgagaagctgggggaagtgggcctatcattagcttgtgtcgcaacgtcacgtcctgctgatttcagcattgtaggtctcccccggattatttctagtgcaatctctcatggcgtgtgaaagtactgccaacgtcgaacccgttgattcaaccaaactcttgaacaatattcagatagctactttagctccttgagcgctagcccaagtttagtatagcgctgggccatggcatgggtactcgaccaccgggtgccattacgtaggagagatgacagttccgttacacggcgaagaatcgcgcgatccttaatgttgcgcagcttggtcatcagcgcatgaatcctcgtcaggagagtctcgtagccggtcagatagtcggatccagccagatgaaacctgtgcgatgcacagtcgaccataagaagagcaccttcacggcttccaacgtactggttcacgctgtggttgtcagtaaccatgaagttcacagcctcatacggcttgttgtagcgtgagagcgtgtaagcgatgagatcaaataggcgttgcaccccgagattgaccaccacgtcaagaggacaaaatgctagcagcacagagcggcgagtggagcagtcggtgtcgtcgtagtagtcggacccattcctaaccttcgtccatggcacatgtccgggtctttgaacacggcgaagtggagatgtagtggcggccgttaaaggtggagccatcgattacgatgccgagcgtggacggaagctcctcagcaatcctaaaccccacagactggttcactcgcatcaagtacgtcttcaacgtgttttcgctaatcaaggacaacaatattgtttttcctcgtcatcttgcgctcgacaaaattcagaggcagccggtccaacacgacccactcgcgccagcggaaaatggtacgcatgttgtcgtcgacaactcgtaggcggagtgagttgcgctccttcgcggcttgagaggcgtcttcaagataggtcgggtgattggtggggagatgcgtgatcaggttggtgtagccatgagcactcgtacacgtcttcgtgcaggtcaagcacataaacccttccctggacttcttggtgaaccgcaggctgcaacctagcttgtgagataggggtttgggaagacaccgaatgcattggactaggaaactcggtggctcagattggccagttattttttttactttcgctagcatctaattgttcagaacatgaagtgatttgtatttaagtagtataccgaggtcaagtgcagtggaaaccattgattgtcaccatgaagcgcattgcagagataagccaaggttctggaacagtgctgtgatggcgtgtagtacacgtttcaatctgctgcgatggaggagctccgtgccggtcaacgtcgcagctcgcacgatgtatacgatcatctgaaacagacggtgaccatcgcagagctgagggagggagttcggtgccaggagactgatgtcgagtagctaaatgatgtcctagcaacgttaaaacaagaactccacaaaaaggaagaagagatggaaaaaatacgccaagactcaagacacgtatttaaacaggaactcaagcttggaattgatcgcagagaggaggcagtacaacatcaaagccacggtaacagtaacactgactggcagtaaccaagcaacaactccataatatcatgtcccaactacaagacacgaaacgactgtttgaacatgtcaacgccaagaatgagaaggtcaacattacagctgtcgcaacggaaagaggggttgcccagccaatggtttgcagcctcggaaaggttggaggtgacctcgtcatacgatggctgattgtatgcctcgttaaaagcatacgtcacccagtgctccttggatattccattcagatactccacggcttgaggtcgggtgtccgccaacttggagctgtagaacttgtagtcgttttcgcactcacttctcgccatctggaacacgaggccttgctcaacaggagtcagcgacgatcctcgcttggcaatgttggatatgatgtgccggacgcagaagcgatggccggagtccggatactcttccgatactgtggcaagtaatctcttctgtcggtctgacacgaacaccggtttccatggtagcactgatcgccgttttcatgtccgagagaaaccatttccagtttgcataaccctcctggctcactagagcgagtcccaccacaaggatgtgatcattgaggtccttggtggttgccagaaggaagacgccgcgcttgttcatgtcccccttcaagtgtgtgctgtcgacgccgatgacatgcttgcagtgctgcatggccttcaaacaagcgaccaggaagaagcaggcacgactgaagacaccaccacctcgtttctcaaaccagtagctcgaggtagcgtttgcgtccgtcgccatccgaaggcgcctccagcttctaatagcttgcgaggacgtcatcacgtagagactcgaggagatccagcttaagtcgcgaggccgtctggcggttagttatgatctaccttaacatgaggaagtcagcgatggccctaccagtcacgttggcccaagtttcgctgtaggccggcaacattttccgctccaatatcccactcatcatgctatacgggacatctcgttggtgctgtggcgttgtatccgcttgcagattgccctcaacaaaggtttcgccttggaacccagcgtggcggtagtggttgtgcgccaagcacatctgggtggctttccactcattacgaagcccgtacaccgtgaagaagcatgggcaggctgccttgttccctggaaccagcggttgttgccccttcaaaggcttgcaggtgtacttggcgttaccctcccgagtggttttgcgccagctattgttggcaactcgaagcgaaaagccctgacgcctggcgaactcacgacagcgttgctgcaggaccgccctcgactcgaacgttgccggcacgagattttgtccatggtcggacacgttctcgtacgtgctgggagaagcgctatccatagatactgtcatcgcggagaagacccagttcccgaagttcctcgaggctgacggtctccacaatgctggaagcggtgctggtaacagccatcccgagtcgaagttggtggttgggtagccagcgaggttagtcggagtgtttgtagcgaatgtgaaatggaaaatgagagagaggctcaatcgaggacaggtataagtttcgaaaccaaccaaaaccactaggttgcagtggagtagatatagatagaatccattgtcgtagttggaaaacggatataaagtcacaaccgctcgtgttgtatcctactggacgaaacggatagtgaagccacatttgtaaaaatgaccgagtcgtaaggtttgacgcaatgactgaatcgtaagttttggtgcaatgaccgagtcgtaagttttggcctgcgttaaaatttacgcctcgtccgttttaccctaggttaactaatgggagttgtactttgtggttcgcataaaaataaatgcgaggatgcgtatatcgtaaaaaaaacgaatcgtaaatttcgcttgttaaaaataaattggaaatttacccattcttcggataagtagattggacgttgaatctacttataagtagagcatcaatctacttacgtttggacaaaggggccccaatctcattgaattgtttaattgctccttatttggcttatggattttctcttgtactgaactggaacccatataatacttgtaggcataaacaatgacctctcatgcgtctcgaattcacgactacagtataaattttggtaggaagctttgaggccttcaagatccttgaccccctttctacacacccttgacaaacattagcttccaccccagtgaagtcgcgtacatggtgtccagaggtgatgaccctcaacgaggccacgatggccactgaacgtcggtacatggggcagttctgctttccgcacccaagtgcaagcgctgcaagacgagtccgtcgtcgcgctggtgcctggataagggcaggctcaactacctgtggtcaccgttccacgcctgcatgtagaccagtcagcaccaaacgctatgaacaacaagggcgagaagccgccgacgaaggcatgctacctcacgactgcaagcttcccggaaggattgaagaaggcgaagggcgactacaatccgcgccctccgccttctcccggaaggattgaagaaggcgaagggcgactacaatccgcgccctccgccttcttcgatccttccgggaagcttgcagtcggcccaattgctggtcgcgagtaggatacctcacgagttcagtgcagagacaggcaagtccctatccgtcatatctgtagtgttgtggatgggggtaactagagccggagcgactccagctgtactgacggctatcttcagtggtcggctgagctcgcgtggccttacggtgatgcagtttaagaagacgtccaaatgcctactgttattggaaatgaatcgaaaagctactgactatcatatattcatgtaaacacttttaagacaattggagtttacatgggacttagtcggatccgttcatatcgacttcgtggtcgccatagctctcaacgaattcagaagccagcgaagaacacctccccggcgactcgtgttgtagagaaggtgttggtgttggatcgtgctcaatgccgtagctgccaagccgatgcatgggttgctccatcgcttcaatttcctcgtcgaagacgagtaattagccggtctcgagatcgctctcggccttccaggcaacgcgcaagagcgtccatgtgcgttttgttgtcttcgtcgtcgttgtggaagcggcgtcgaggttcacgtggcagggtaaattgctttatgccatgccagaccaacctcgcaaggtaagtttcagacaagtagcacctaggtgcaaaatatatgatggcgacttctgtacttaaattgcgatgaaccggcccccaacctgccccgaaccgttagagtccagaaatgctataaatgacgctaggttacagggccagaaactggtatccatagagccattctaattattttggtacagcgtcgaacagttaactctagtagacttgaactcaaaaaatgtatctaatgtatgtaactgccttttcgaatgtactaaatgcaataaatccatcggaaacgcgatgtgtctggctagaatgcaatctatcccaactaaacaaaaagtagccggcgaaaacaaatcttccagtaccggtgagtagtaccctcaacctgtaccattcaggcagccagctggaataatgaaattgccagatataatttcgaagaatattccatgacatgtgtattttgactttgattactactcccaagtttgcataacctcaacatccatccatttactaaccagccaattaaacgtttcaatatacgttccatgtctcatgcgacatgccaccaacgcaacccgcttcgttaaatatacgatgctaaaggaatctaagtcatccaaacataaaataggtagtttgccgtttagtaaaatcgcggtacttcgttgccggacataccatctacgattatttcgtgttttcatagtatgggaagctacatccataacatcaggattatgtcagccattttttataattgtaaaagatggaatggaatggggaaagggggggggggtctatcttgacttgtaaacacatgaaatggcgaaaatgcgcgaaagggtaaagacgagataaacttggagtttgcgtacatgatttcatgaatagccttccgcatagctgtatttacctagagagcatgaccatgccaggaggcattgatgtagtcattttttgtgcggttcatcaagcgactacggacctctatcgatcgcgccgtcgatgccatcgaccaccttcaacacggcctactgggggtggagcgcatcttcgaagacgaaattgcccggcacaatacgggcatgtcgtgggcattgcgccaagtcagcggctaaccactattcgcctcgccggacaagggcagaaagagcagtgacgatccatctgggtcccaaacaccaccatttgacggaaattttgacgatctcgagattttttcggccaatcagagtctatgtgaaatgacttcagccagtctaatcggctactcggcccaggtgacgtcatgatgcaagaactgaaagacgcccatataaccaccgcaaagaagaaggatttcaatttgtaaaaatgggtgagcctgagcgatttcgagtttttcctttcctagatcgcgtcagctgagctccgggtacacgaattcaatgtgcgttcagggccttggcgaggcgggacaccatacacgatacgtttgtgccggcgttttcgacggcctcaatgtatcaacccggggcggcctggacggatcgagtgcgttcagggtttcttatctgaacgcagtcttcgagacctgaagggcccatcctagacttgagcgcacttcgctccgcggaacacagccgaatcccagctcagatcgtgccgcacggtgtggtccgggttccgtctcggccaatcagaatggcggattcagtcgggtcagtagacaggtgatgaccggttgaggcaaaatctcgctcagtctcgtcacagccctgggcgcgtaataacgataccggtacatatttggtgcagcaaatgggagcacaccattgatagctggtttgctgactatcatagccagtaagccagcaatatttgccgatgagttcgatcgtgagctcgtcggcacacaaatctatgtacgacgcaggcgacaagctagtacggggtctctcagatacatgtgcttctgtcgaaaacaactttttaagcccggcggtctcagccatcatcaattcacttcgggcaatgtgaataccgcggctccccacccccaccccaccctagaggcgcattcgccaggacccaggaggacgacgagacaccgaataataacagcactcatggatataccgtgaatctgtaaagagggccgcagttaccgctagcgaggtcaagaagggtatgtccagcaacgatgctattagttgatcgtgattccactgacacgtgtgcacagaggtgtcgagcgtgtttcacggttttcctcagaagccaacgcgccacgaacgagggccccatcaaaagaagaagtgcccgaagcgcgccaacacttctatcaaaaggaaaattggcgtgtcatgccaagcactgcaagggcgagtagtcagcgtttgtacctgtagacactttttgaacgtactgaatttccaacattggagcctgaggttcatccagacgtgatagatcttcagcctcccgacatttcgacgaaggcagacaatacgctccgtacaagcaaaaattatattacacgatcgcagcatcggaaacccaccgacaagcgatttatcacgctgatgccgaataacaataagtgcttggagaacagaaccgccgttggtcctcgcgcgtatgacaagtccaacttcaacaacaccacaacaagtttcgaaaaatcatagataaactctcgatgcgttgtaaaatggaccgtgagacgtcgatgtgaatctcgacaacaccgaagggtagaaggtgtttcgagatgcccaagctttcgggtttacggagcgtttgtcatacttggattgtcggcgaaagcgcaaactctgcacggctcttcaactgcattgtaaagttggaccattatctttattggcaattcaacaccccacaatgcaagttgatgagtcctgcgtacatctaggtaccggacaacaatagctatcatatgatagccgagaccccggaatagaatagaagcgctcccaaaaggtccagatatgttggattacctgaatggaaagtcgaaaacgcggatgcatgtagtaggaaagggtatacacgtcaacgcgtacaacaaccgcccccccccctccccgacataaaaaggaatattacggccaaacgatccagaatgacattaaccttgtcagccctgatcagtcataaaaaaacacaatgcagtgtacagtgtacaagtacgaacctgtgattatcacccttctggtggagcaggccaagatatatggcgagtacacctcgataagcagcgttcacctgaaggtaacccaatcgagaatgtcggggcaagatggcttcacttttcgatgggcgacagtacaatcaaggcagccaaaaaaataaattgacgctcaagcaattgccataaatattattgcataatttatgagcagcggcctataccgtaccattatttatgataccagattactattccagactgataatttatgatactatctcaaaatcatacaagctgtagtatgcgaacaaaagaaagcttatactcatacagcaagccatatgcatatttattaactgtctggaagccaaccatttggcaggcatgacaagcggctgccagctcagctctaagcaccattgtgcaacttttaacggcacaagaacctcctcacctcaacaggcatgcttcgcgcgccccgcactcgcccatccttctctaacgcgcaggtctcggcgtacttcttcacgccgtgcagtgatgagtacggcgagtctgtacccgactactaccgctgccgatgcggtaccgtgcggaatcagacgaggcacaacgggtttattaacctgatgcagcacgtccgccgagagcacccgggcttcgaagccaagatgcgggctgcaacaacagctgagaccggctcactgattccctacgctcgacgtacgtcggtgaaccgcttcggctggctggagtgggtcgtcaaggttaacctgcccctagtcttttgcgagaacccactcacaggaaggtacgctcaaactactagtgttatactatttacgaatactaattatgaagtactatttttgcaggtacacgagtgtggcccctgtttcggtcgagaccctaaaggcactcatggaggcggtcgcccagttagtggggttggagatcgcggcggagctgccggatcgttttggtctcatgctggatggctggagccatgcgtcggtgcactatgtcgcagtattcatatgctacgagatcgacgttgttgttaagtacgccctcctgagcatggcgccaatcatataagagccggacgatggcctctcggcacgtacgcaccgagatttccgtcgctagtctgctcgtgcggttcggcaaaacgctgagtggctgcgtttacatggtcgcagacaattgctccgtaaacaggcgcctggctaccatcatgcaggtccgtctggttggctgtgcgaggcacaggctgaaccgggctgtgcaacatcaccttgagcagtacgaggacgatttggcggtcgtgtaagcactcatactgaagatttgcacgccgaaacagtcagccaaacttcggtaagtcttgtttattaaagggttaacccttttgttgcaaaacgctgcataatgcaacgtttttacgattttgcccaatagaacataggcgtcatattttgggccaatagtttcgctaccggaaaatgtcgcaaaaaacgatgcattatgcagcgtttttcaaatatctccaaaatgctatatccatttcctctatgttgttatattagggctgccggaaaagcgtagtaaaccgatgcatgatccatcttaattgtcttaattaaccccttggacgcggagggttggaaattcaccttatgctgttctgaacagcataagaaacacttcatttcactatacctctaaatccgcaaaaagtgattatcgtcccttcccatatgtagcttgaatatcattagtccacgtatctaaacatggtcatttgattgggcatcaagaacatatgactatcagggtagttgaactaccgcgcacaagcacgaaccattttcagaaaaaatcaagcatcggttcccctcttgctgccgccactcattcttcattcggcgcagcaagagacaaagtggcattttgggatgacatcgacgcggtggggtcacttccgtgcaagccccagacagacgagaggctcggtaagtgcgctaagtatcttggtataggtcccaaactaactagtgcgactatctctttgaagcgcgagctacttgaagtctgattgtaagcaccgcggcgaaagcactcccttatttcgtgctgcttggtacgtatgcgcacaacttctgaatacatgctaaccacttgtgtgtttactatttgctaacagaactgtatgcgccgtctttgcctagcgcgactgtgctgcgaagaatcgtcatgggtgttgggacgctagaggtatgcgttgcattgttgggatgattgctgcgattggactaacctttgttgccttcagtaggcggtcgtggtaggatggggactcgagtatctccaacaggcgttggttaccgtgaatgtccaaggcttactatatgtgctttatgccgacggaatggcttctactgattgagattggtttatgcttattgaaatgttttacgaagatgtatatggtgctggctgttgggacgacgacatgtctacatgaacgacatgtcaagagcaacatcgcctccagtggcaacgtgataaacgtttgagtactgcccaagaacggatccactaaagacgagctgaaggagcccgctccgcatattgagggccgctgaagtaaggaatgttgtgggcttcaagttttacattcatgatgagaggacgccgatttcgcgtggaaggtatgggtgaaagttgaattttacttgaaagctgactcggtccgcttacaagtttgactttatgcagacaggatcaggacaggatgccttctcgcttccaaaccaagtcacatcctccacaaccatagcaatgccgagttgaaagacatcgagtctgtatcaaaggctctacaaggcagtgatgttactctctttgatgcgagagtgtggttcgacgggctgatcgcagcgcacccggctattgcggactacatcggtatgtaccaccttattactctgtgatattgctcattaatactaatttcgtttctgcatatcaattaagggccgcgcgcagcgatcgtccacagccctgattttgaagcgggttgtctgcgtgtcctgaaggacagcagcgtccgactcaccgccgcagagaaacgggcgctgcgtgcgttagcgtgtagctcggccatcgccatgaacgatgcggaagacgacggcgaggagccggagggttcgtttgtccagcgtcttgagaagcgtcgccggctcgaggcgcgaaaaccccactacgacctcatctccagcatcccgccgacctcgaacaaggtcgagcgggttttcagcgtggcgcgtaccacgtttgctcaagaacgcaacagtctccagcccgctacgctggaaacaattttgtttctgcgcgagaatgttgacttctgggacgttccgacagtcgatcgcgtcaattagtgtgagtaacagtacgtctaatacacgttgaagttgcaccacattatttgatttattgcttgaatacattacattatttatgcaggtacaaatgacaagatccttccattaattatgaggaactatctgcgctaatacataaaaataccatattcggtagccctgagtacaactcagttacagagcgcgagctgatctggcgatcgactgagaagtagagcttgcaactcttcgttgaatcgataccccaccggtgccttgcggtagttaaggcgaaggatggactgaaacctgttaaccatatctattttattattgtagttggtatgattgacgaaaaaggtgtctggtactatttgtgtcacagtagccaacattagtttttttgtatgggaaccctgtcaaggagcccgatatctcgcatctcgaacggtagtgataattacacagaattacacgaaaaatacacaattacaaaatatatatgtaaccccaacggtgtattgataaggcatcaaaagtaacgccaaagtaacaaccaaagtgaccgttcactatgagtgaactgtaggaaatagaaagtgtataatcacttcgtgtccctacgaattgcttcaccagtccctatccagtcggcacgcagtgcaagctttcgccatgccatacgcgacgctttgggacgtcgaggaggacgtgcgcttgtgcaaggcgtacatcaacatctcagaggatggtgcgactagcacggatcagaatgtgacggttttctgggaccgcattcacataaagtacacacagctagcaccaagaggagctccgatcagagggcgagcggcacttcaaagtcgggggtgcgggctcattaggccagacgttgctcatcatgttttggcagtggtaggagttctacattaagttgatggtcttcttccgatacgagttgctttagtatgtctaacgatacgagtttatctgctataggaaaaggtgagctgcgcagtggctggagggaccaagagtatattattgaagcctccaaacggtttacagcaaagagggggcagtcaaatgccaatacgtctcgtgagtacaacgaaggagttaaggcagggagaattaacccaaagacgaagagaaaaccgcgtctgaggccagagattttccgacttcaccactactgcgatgtcctcagcgacagtgtctgctttgtcagagacacctcgtaaacgactgtgtccaccctctgtctcagaggaaaatggtctcgtggatcatgaaggtaatgtgttaagttgttttaggaaaacgttttacccgtgcagtaaaactctaccagtatttatttgatgatccttgaaatgcttcccaccaggaagtggggcagttttccattgccatttcatgcagtagccataccagggaagccacgagcagcattgacttctagtatgttggcgatatcttcctcagtcggtaagcgcaggtgatgggccccataaattgctattattgcctctgtgaacttgtccaatgactcatggactgtgactcaccaatccaaagtacctcgtttagagaatcggctgcacagccgtaagccagcattcttagcgctgctctgactttctgagcgcggtgaactccgtattttcctgtgcagtccttccgccacgtaaagtaggggtcgtgcttacctagggcttccaataggtcgaggaaacaaccctttgctcatccgaaaacggtgtcgaaattgctcgtcggtatacatggacttctcgtcaaagtacatctaccagatgcgtccatacgcagcaacatggtcgtgtttgacattagcacttcgcccacgtcttgacccccgtgttgcttcttgcgcgacctccttcgtcgtatgtaggccagtaccaagaactaagcgcgctagcacttgtcacgttcattttcctgctgctggttttgagcgggcccgctctgcgaatactcactatgcaatacgacagttggatcaaccgccagtcccaaaacaagaatgaagcggttaccactgcaagagtagatcggttgtcgctgcaataaaaaccaactgatgaggtcgcgccaactccgtgtagtaagcaccgatttcggtgggggctctttctctcgctctctccgccgggaccttaggcgttaaaccaaggttgaatttcagagcacggcatatagtagcagtagaattgtctggtagtgcaagaaaggctgactttaaagctggttacagctcctcgatttaaaaacagggatattcttcaatactgtagacgtagtttagtacgatagatagatagccagcgcatgtcaatcaaagcaatcagacaaagcgagcgagttagaattagaatgtcagggccgtagtattgtcggatacactccagccattcaacgaaaatgagcagaactcaacgttagctcgttgtcttagcagctattctatcttaaatcgacgagttagcctcctagttcaatgatgggctaatcaccgtgatttgctaaaaacaacgaattacgtcgtttttagacagaaagcatgcaaggcactgtaatagtcatccgtattattatcggtatttgtatttaactaggttaatagaatacaggacaattagagcacttttagaatacaggacaattagagcatttttaggtaatattttccgctgctaccctcgtaaaaagcgtaaaatctgtaattcgattgtttttatcataagatttccaataatatacaataagcttaagttaatattggaaaaaatatgtctggccgtacagcccatttttcgaaataaggttagggatcaaaacatactaaaaccaagtaagatctctaatcatgcttcggggctacgtttgctggttgtccatgcttctcaaacgccagtgatgccgaattggtctgtgcatcacgatagagttgcgggccatttcaccccctccaatccgaaaacatgggctgtacattttccgaaaaaagattgccccaaataaaatcgggaattttggggatcctaaaatggagataatttgtttcagaccggtgtcacttccacgagttcttaacattcggtacaacgcacgccgctatgcattagttcggttaaatcgcgattcgcactagtgctctgtggccgggctaacttacacttgtcaggcctgtgttgccctatgttagctttgctctagcgggctcttaagaaatgacacggcggcgacgccatactcagggaggagttaaatcggaaatgggcctcgatggaaatcatcatgcaaaagttcaatacatgcgtagctggttatgtccatatcacttctaaaagatccacaggaaccgcttgcgaggaagctgctccttgagtgcgatcttgcgttcctccagggcggcaatctcctcgtccgcttcgtcaatgtcgcgtcccgcgtacttggactcctccagcgccgcctgttgagcgcggatctcctcgatctgcagacggatctccttggccgagtccacgggcttcttgtttttcttctgcgcggctgcagcgctgccccacgtcacacgaggtgcgggcggccaggcctcgtgggccgtgggcgccgcctgcttggaagcagagctctcgtcttcagcctctccttcttcagcgaaagtgacagcgaccacgccgtcgttctcgggctgcgccgactgcttcaacgcgagcttctcgatctcctcctgactggccgagcccgacacctcaaagcgcaccttctcgcccgacttgagctccgccaccaccgtcaccgctgcaataacacaaagaagaaaacatcaataaactcctctaaaattccgcgttcctacatacagcacagtcctcaaagcttactctcgttgatgaggtcctccgtggatccgatggggccaatgtcctcgcggctggcgagctccagcagcgcctcgttcagcgggacgtactggttgatggcgtcgatcaggtccgggtaccggtcgttgaagtggttgtagaactcgtcgtccgtctgcaggttgtacacgaacacgccgcccactgcaccggggatgccgatcatgatggccgtcgtgtaccagaagtagcgcgcgaacggggggggcttgggcttggaggacgcagccgtggcagcagaggagaagaggcggggagagctgcgctgcagcgtgcgcagcatcggccggaggaggaccatcttgactgtgactttgatgcacaaaatccaataatgaccaccacagacgtccgcaatgatctgtgattggctgatttagtggctgcatattttagagcattttgtgccaatcagtgccggatttgagcatggacgacgcgggggtgacggtgtcgtacgcctcgggcgcgtacgcgactggcttcgtgatcctgctggtgggcgtggtgctgcccatggtctacatggtgctgcagaacaagaaggcgttcaaggcggtgcggagagactgaaagtcgcagcccatgacgtctcaagaccagggagataaagccacctacatgtacgccagaagaagatcgcgtggttgaagcggaagacgaagcggccaggagatgcaactcggcgtgcaattgagagacaacaagaggagcaatatgcaacggttgcggcgttatttggacgggaaatggcagtgaacgagatttttttcttcttctttaatgatacattgggctgttgttggggtggtgtcagttgagctgctgagggattgttgggcggttgcaggggaagaacaaagtgcatccttcatctcgctacgccacctggccgctgtgcgaacttttcgtgccggattcgctccaagttctgctgttgctgcagctccgccttgacgttctggtaccgctgcaagagtctggagacggtaaagagttaaagcggttgaagattgaagcggcaagagagggaagagggacctaccgttcgagatcgacttggcgctgtttcttctgttcctctcgcccggattgaatgcgcttctgaagcgcgtccaggtcctgcttctgccgctgcttgaaggtcacctcgcgctggaacatctcctgctgcttgaggttgcgccacttctcgagctcccaggcctccagcgcgtccgacttgagcttaatcttgtgtgcctcaccgtagctgcataccaagacaagaaggtgagctcataggcatggaatggggactgttagcctaacgcttactctttctgtcgagcgaggtgctcttcgatgcgccgcagattgagcaggtccttggaaaactttggcttctggtgcttctccagcatcttctgctggaactcgagcagctccgacttgtgtttttctcgcatattgacgacgagctcttccacgttgcgctcgtactcgtccatcttgcggtcccagacctggttgaactgctggaactcgagcatgtgggcctcttcaacccccagacgctcggcgatctgccgcgaacgcatcgcctccctccgccggttctcctcatgcaccttgagctcctccaggcggttcttggcgatctcagcctccacgtacttgccctgccgctcgcagttcttgcggtgctcctcgaggatcagcaagaagtcgttcaccgccgagtcctccacatccgtcatcctggtaccgctgcagttgctgatctatcgagccaatgcactgcaaatacacgcagcgcctcgcgcttcgatgctcggggtccgcgccttcctcccctctagcctggaccgagttagcgtggccagaacaatctcgacccagcccaattataaatgcagcctgcaactgccataccgttgctccccaagtcgcaaattagctcaacatcgctccgctaagaataccaagcatggacttgcacggatacaggggtatcctgcattcgtttcgttcgtgagcagctgaaccttcctagcaacatgcatctagggcaccgaggtggttggttactttctcacttggtgttccatttttttctattacaatgtgttgttttgtgtagttgtggagcccaagcctccatgtagaaaggaagagggctacccttgtgccaccgttgcgagagagcagttcgctcctcgcttagggcagcttcttctccatgacggcgttgcccgcggcgtccttgccgtggatctcgatgtgctgcaccttgggcatgccccaggacgtggtggagtacacgaacacgcgctcgagcgtgcagccgtcctggccgttgatggagccgcggcccacgggcttgccgtccacgatggacaggtagatgacgcggtccttgagcgacgtgagcgtgacctcgaactcgcccgggtggccctcgcgcggcttgacggtggccccgtacgccgtgttgcgctcgatcatgttgagctcctcgcgcggggcgccgtcctgctcgaacatgatccagtacacgtcgagcgggttctccgggttcagcgtgccgtcctccagcaggttcacggcgtacacgaccacgttcttgttcttgttgcggtacaccacgaaggccacgttcgggttgtgcttctcggcgatgagcggcacggggttgttctccaccttggaaaagtcgagcgacatggctgaggattgagagagaggagaagtttcttgcttccttgctgcttgcggcggacgcgacgagacggagaatgagcgcacgaaagcgccaagcacgcacagatagctccacgtggaaggaagagattcctctacagccgattgaacagccgttacgtcggtgtaaacttggagctcttgctttttgtatgccttcgtgtgatcgtcagtgactgctatgtacccatgcaccaaataccggtacggacaaagaccctaccgatataccggttcaacttcaagcagacgatgcaccagctgctgcacacatcttctacaccaatacaaggtgaaccacaccaatacgaacctaagccgcacttacacccctaataaaaaatacctgcacttgcactacttgcgcactaacttgtgccaccaatgctgtggccgcgcgaggagttccacgccgcgtacgggcagatcaagcacgacgcgctgcagtcgggcggcagctgcagcgtgctggtgctcgtggcgctggacgtggacgcgctgtgcgccgccgagatcctcacgcgcctgctgcgcgccgacatgctgagctactcgctgctggcagtgcgcggctacgaggacgtgctgcaggcgcgcgagacgcgcatccgtggggccgacgggacgctgcgcggcggcggcgagctgcgctccgtggtgatgctcaactgcggcgccatcgtggacgtggccaagctgctggcgctgccgccgcacgtcaagtgctacgtgctggacagccaccggcccatccacctggccaacatctacgacgagcaccagcaggtcgtggtgtttgacgacggggcgctggcgctggaggattacccggcgtttgggccggatctggaggtggaggactttgacgaggaggaagaagaggaagaagaggaggaggaggagggggagggggaggaagaggggggagaagagagtgagagcgagggagaagcggaggtggagttcgggacggaggatacgcaagacacagagacaggagaggagaaggaggagaaggagacggagaagaggaagagagacgagggagaaacggacgaggacatggagagcagccccaagaggaggaaggaggacggagagggtgacggtgaaggtcaagatgaagagaaggaagaagagaagaaggaggaggaagaggtaattacagtcgctcaggagccgggggaagagagtgctgtgatggcgaaacgacgtcgtcgcgaggagatcttgcgctactaccgtggttcgttccacggcgcgcctgccgcgacggtggcgtttgagctggcgcagcaggtgaacagctcgcagcgcgacctgctgtggttcgcgatcatcggactcaccaagcagttcgtgctggaggagatcgacgtggacaactacaacctcatggtggccaagttccaggacgaagtactggccatcgatgcaccgacgccgtccagcgggcctggagcaaacggagaggaggaccgacacccgggctacgacgacggcaagatcagctttgaagaagagtaccgcttcatgtgctaccgccactggtcgctgtatgaggccatgtactactcggactacgtggcctccaagctcggactctaccatgaccaggctcggcgcgttggcgctcgcaacgcttcaggtgacggtggaaacagcgcgggagacacggagctgcacaggttcttggcccgcatgggcttctctctcaggcagagccagcagaagttttcgtacatgcctctggagatgaagcagatgctgcgcgagaagacccaggagatggcgccagaatttggtctggacgagctcttctacggctcgttcaagcgcacgttcgccttccagtaccaactgtgcgctgcggatgctgtgtacggccttcaagctctgttggaggctcccgagagctacgttggcgcagtttttgaggctgagacgcagcaccagcagcagaattccttgacaagacttttctcgctggactcgatcatgtcctctaccgttgaggttgctgagaaggatggcaaagataaagacgcagacgctgccgaagaatcccctcaagatgacttccggcagcagaactttatgctagcacacacagctctcgcgtgccagtcggtgacgtccagtaagctgatggagagtggcatcaaggtggccatgtcgctcaagcaggccattgtccgcgtggggctgtcgattatggagcgcaagctgcttgtgcgtgtcaagcacttccgttacgtgtgcttgaacgttcctgagcgggagcaagagctcttcgctaacgccaacgtgctcacccagctagcactcttcttgctcaacgttcaccgtgcaagcggcaagtggggtggacccaacgctcccgcccggaggaaaccgcagggtgaagacggcgagaatggcgaagacggcgacgcagaggaagaggctccggtggcgaacaagagcattgtcccgttgttactcatcacgcgcaacccggcccagaactgcttccttgtcgttggactgacgtgcccctccacgcctggtgagatccaccgaaagtaagtgtttgctggcatgattgttcctgtgacgttcaagtgcagtgctgacttatcttgttgatttgattttatagcacgcttggtacggcgttcaagttggctgcgggtgaaacaggcgccaacttccgacaggacggcttcacgagcgccgtgatggaaattcagatcgacgagatccagtactttgtcgagcagctccacaacgtgctggacgcttaaggcggatagctcggtggtaaggtaactaagtaaatagatgcaagggatgttgaagggtgtattgcattgtattgtatgtttcacttgttcagatgtctatcacaacgaatttgctgtctctatgatgctctatcgaatcgcgcggaacgagtgcgacgtgtgcaacgccttcggtcccgggatctccgagtcgccaacgatgctgaccccgcgccgcttcttgtgaaattcacctcggacaagcgggacgaagcacacgggcatcagtttgcggtggataaagctggatccacgtcgagtgacgccaacaagagcttgacctccgcgtgggtcgtcaacaggtacgacaagctgtccaccgtcagctaactggtccaacagagcctgcggcggagaggagacggctgcgccgacgaagatgaagtggaaaggtgcctccgcgggtagaccgtgccacccattgtagcagtggagagacagcacaccactcttcatcagatcaggggctgcgtttagcacgttcttgcgtgcagattgagcaagtgccggcagcagctcgagtccaaacacgcggccatccgcgtcgtccacaaggcgggcaagcgcagcagtcaagtatccggatcctgcacccacatcaagtacgcgcggcttgagtacacctgcaaatgtggcgtgggccagctccaggacgtgcgcgtgctgtacacgcattgaccgaagttatcttgtggaacagtgcaggctcgctgcagtggagtatacttaccatgtgaggcgccgagatggtctggttgaagccgatggggcacggtgagtcctggtatgcctcgtcttgcacagctcgcgggacgaagagagctcggtcggtgcgcttcatggcgtcgaagactgcgtcggagcggacgataccttccttctggaggttctgcactagcccttcgttcgtggacgagctgcaaggccaaagcggcaacatgggcgccatggcctcccctcttttggtgacgagcacgtcgcgaggttcacagcttggctggcgagggaggggccaaggcgacaggaaagtctcagcttggcttggcagggggggttctagaatggaaggacccgatactacagccagacccatgcgattgctcagaccaccaagcctccagcaattcagcagttgcctcgacatgcgacgagcaggcttggcttcgaacctggcccgcggccactcactataaatattgaggacgattagtacacgaccagataagacacctggaatagccgaaggaatgatgccatctctgttgagtgtagaggaaagagaacacgcgagctcttaaggcgattaataagatacttgcacacgaacagtgacaagctcaagttgaagttgtggtcgaattcttttgtggtttagatacggtcaagctaagcgtagaaaactaatggatggtcaacactttctggggctacggtaccactgcaactccatgggttctcgggccctttcaatctcccggcaccttcctcagctgagcttgcgctctctcacgagcggcacgtagcagacgccaaacagtcggcgctgcgagaagttgatgccatgtcgcatgatctccacgaagatctggccgccgcgcggctcgtccagcggcagcacgaggcgtccgccgtccgcgagctgctccatgaggttctgaggcggggattcggctgcagcgcccacgtggatgtagtggaacggagcttcgttcggcagtccgtcccacccgttgtggtagcgcacggacacgatccctcgatccatcaggtcgccgtcggccatctggatgttcttcttggcgaactgcacgagccccgggacgatctccagtccgaacacgtggccgcctctgtcttccaccatgcgacccagacacgccgtcaaatagcccgagccagctccaacgtccaggatccgtgggttcttcacgtccttgatcgccgcgtagccgagttccatggcgtggccgtgcatgtggggagctgagatggtctggtggtagccgatcgggtgcgggacgtcttggtacgcttgcaactcgcccacgtggcctccgtcgggcgtctcgatctgcgccaggtacttggcccgatccgtcttgaccatcgcatcgaacacagcgtccgagctgatgacgcccgtgcgcttcaagttcttgaccaagccctcgttgctcgacgagttgcacggccaaaacgacatctcgggtgactgcgtgcggtacgagaagcggcgggtggtagtcactttcttgctgaagcggagcgtcctgcgagcttcttggggattccaggcaaaagccaaaatggagatggagacggacaagacccaacgggatccctggagtcttgagtctcgatccgacagttgagtcttgcgcaaagtatctcagttctccatcgcccgttcccaatcagcgacagtcttgaagctcagctgtgtgctttggtatccgccatcttgcaccaaagtgatatcgtccagtcccaactgtatcaataaatatgaggctctgctctatgcagcgctgatttcgtccaagaagaactggaagaggtccaccagcttcttggctgttggacgcttcttcgggtcgctttgcaggcagtcttcaattgcacctgatagtttgtcgacgattgcgcttgaagaagacaatgatacagtcaacgaggcggcagaagacgtcggcgtggtgccgaagctgctctcgtctgcttcggcatctgtaccgccaatattcgccagcatacgcagcttgctcatgaagtgatgcatcgcagcgttgtgtagtttgcccttctggacggcactggcagttctgggaagggacgaatcctccttgcttgcacctgcactctttgattcgtcctcgtggttgtccatactcagcgtcagcttcttcggtcgactgcgcacctcgaactcatcgtttggtcggtcgttctggaagaaaatgtacgagtggaaccaaagttccagtaggaggatgccaacgctgtagatatccacgtggaggtgtcgtgagttgtgatgcaatacctccggcgccaccaacgggatcatcggcccagcctgctcttgagaatttctcctttcgggctgcaggaatcgcacgccttctccttcctcctcggagtcggaactttgcaccgcgggggcatcaactaggaggacgtgggtagcatgatgcttgtcgtcacggctgtggtgacgagcatcgccaatcttgcagcggagcagctcggtcaccatcacgttccgactccgcaggtcgctgtgggaaatgcccttgttgtgcatgtaagcgagcgccttgcaaatgtccaacgccatctggaagcgcgtcaccaacgccctcttcgacattccataagctgtagcttgggacggggtcgagtcgctatccgcagatgaagcggatgcttgggacaccgaggaattgctgaagttggggcggtcgagtgcgtcaacttcgagcacagcggcgagatcgccgcccttgacgtattcagaaatgacgcacaaatgttcaggatccgaccacatcgtgcccaggcaagcgacgatgttcgggtggtgtaaagcgcccaatagttccacgtccttgatagtatccgcgagctccttgacctcaaaacgcagcgtcatcatccgcttgacgacgacttgcgtaccgcagtagtcacccaggaagatctcgccgtggtagctgcgactgaggatgcggtgcatgtggaacgtctcccactccacgtcgttccactcacgcgtcgcctcttgctcatccggaggaagcgcacgccagcgcttctccttccggatctggaaatagtcgcgcaaggtgctcagcaccaggtccttggtttcttccgggaggtcgtagatgcggaacggcaattcgccacgatccgacgcatcgtcgtcaatctcatcatcgaggagcgaatcgcttgggcttgtaggctcggctagttgatgcatcattaggcccatccgccagtcgttcatggcttcttgctccttgatgtccatcttgcgcgtacgcttggagctcttcatgatcaggtagagcaggaacttgctgctgaaaatgatccctggaatcgcgatccccatcgatagcgtgagccagcagagcatgttgcactcgaagtctctgcacatggtgcggtcagattccaggtctgacgagtaggggcaatacagacacgctatggcgccatcttcctctgaatacgcacgagacgacacttcgctgcatgccacacatgtcccggtcgaattgtcgtgaaaagtgcccgcaacgcactgaatgcagccgtaaagtgccacgtcggatcctgaagaggatgtcaggttaatctcttcgaagatgctgccgttcgggcaatcgttgcgcatatccacgtttgatgaccatccaatgcccgggttgttcagtagagttcttcgcagtcaaatagccaaacagaatagaagcgtaagcgtattgcaacagtaaaagcggtgcaaaacacaagctcgtacatgttcgtaagcagctttttgacgagcgcaatgaagttggtactggggatagatgtaatcaggttggagtcgaaattcctggaacacatttaagctaacatcagcaaaccaatgacaaaacatacatacaagttgccttcgtacatgaactcgatcgtagacatgattggatcaaagacagcggagctgaagttcacgatccgattgctgctaagatctctggaagtattcagatcagaccccacgcgagaatatcagtgaaacaacgtcggctagtaaggatacaatgacacatcaaacttacaatgtctcgagtcccgtgtaaggtgcgagggcatcattcgtcgaaatagaccacaggtagttacggctcatattcctgtcacgtcagacggcattgtcagtaacagtacatgtcaagcaaaacactataagtatgactaaaagatcacgcacaggtaggccagatcggaggctagaaattggtccgggaagtcaggcatgaggtcgagcagattttcttggagctctaagacctccaggttggctggaaccgaggacaacgtcagccgatggatgttgttggcggctagcctcagctcctggagtccgtcaatatcttcgaacgcgtcctcatcaataactgagataacgttgtcgctcaaattcctgatcagtagtaaaataccttgtcagaacgatcgtatttacattaaaccaactcacccggagaaaggaagcacgtacaatttcctcagcgccgacatccccgaaaatgccttggaattgatggtgaaaatggcgttggatgccaatcgaagctcattaatccctgaagcaccagcaaaggctccttcatcaagctccacgagctggttgtagtcgaaagagctgcattcacacaaacatttaagtgaggagaacgtcacaaaattcacaatatcctcacactcgccgcacatgtatccttccgcgacggcattccgaattccagagggcacgtccaagatgaggttgtgggagaagtccagggccttccacgacgaagacgccgtcagcagctcgttcgggatcgactgcagctcgttatacctcaggtctaacgtatgcagcgccgtcaaattcacgaacgcgtctccatagatcttcgacacgttgttctgagccaataaactaatcaaaacaactccagcttagtctgcaacatttcacaacaacgacaataaacaacttgaccacatacatgtattggagcttgggcagattcaccagcgcttgtgactgcaccgtgtggatagagctcccattgaacgagaccgtatccagcaacggacaattcatcgctaaacttgtcggtaacaccgccaccttagtattggtgcaactacacaagcaaaaaactcaataaatttgcaaacccaaccattaaaaacgaaaacttacagcagagtctggagacttgacatgtcgacaaaagactgcgtttccagcgccgtcaacgggttgttcgagatatctctgcataacaacacacaaaaccaccattcaccaattattttgcaacccctagcaatattaccaaaaagcgtagactcacatggaggtgaggctgctggccgtctggaagagcgacgccgggatgctcgagagcgagttgttctgcaggaacagggtcttctcctgcgcgagttccgaggccgagagctccgacaccacggtcccatcgctgtagaaggcgaaggacagcgtggatccgctgccagaagccgtaacatttgtgagctgccgccccgagagctccagactgcaataacatacataaatggacaatattagtcgataataacagataattgtcaattgcggcgtcaatacgcagcggttggcgacaaacaaggctactatggatagataagacgacgtagatgttgatgcaactgagattcgcaccattccgcgcttcctgccgccaccgcgagcgctgcaagttggagcacgcgcctgcagagacgcctcatggtgtcgctgttttttcgaactgagcctcttgacaatcaataaccaattttgcaattaattccaatttatttacaattctagtcttgaagtaaagatggcacactgtaccacttcagcttcgagcttgcgtcgacgccggatgctcaatagcagagcggaaccctcggcgccatgttcctgcagccgcgacacacgcagacggagctccacggctactcggtgcgcgcgttgactacagatatctgcgatgtgtcacgcaagaagctcgcgcctaacgtcgtcattgccgccaatattgggctttatttaatcaattaattgatcaggtggagttcagccccttcgtggacaacttagtggcggtcggcacggcgcaatacttcggcatcgtgggcaatggacggcaacacgtgtacgagatgctgccggcggggggactggctccggtacgttgaggctgttccagcggttaaggtggagtgaggtgctgattgggtgttgtggggacaggtgcgagcttttgacacgccccagggagtgtatgactgcgcgtggagtgagaaccacgggcagcagctggtgagctcctgtgctgatgggtccgtgaagctctggcacctgcagacgcgcgaccagttcccgatccagaactaccacgagcacaagcaggaggtctccggggtgaactggaacttggtggccaaagactcgttcgcgtcggcgtcgtgggacggcagcgtcaagatctggaaacccgaagtgccgcactcggtgctgacgctcgcggagcattcgaacgccgtgtataacgcagtgtggaacacgcagaacaactcgctggtcgcgtcgtgctcgggggacggcactgtgaagatctgggacctcaacagcgcgcgctcagtgacgaccatcgctgcgcatggcaatgaagtgctctcgctggactggaacaagtacaaccagtttgaagtcgtctctgggtccgccgactgcaccatcaaagtttgggtatgtactgtactgtgccgtcgaggttgataaccgtacatctaacactcatttacatcactacaggacattcggaacccggctcgagaggtgcgattgctcccaggccacagctacgccgtcaagaagatcaagtgctcgccgcacgacccggacgtgatcgcctcggcgtcctacgacatgaccgtgggcatctggaacaccaagtcgccgtacccgcgactgcagaacgcgcagcaccactccgagttcgtcttcggcttcgacttcagtctcttcgtggatggtctggtggcctcgtgctcctgggaccggcatgtggccgtgtggaactacttcgggggtcctccgccgtcgccgccgcgttaagttcgcactattgcagctaaaccctccatacttaataatacgatcgcgttcatcactgtcagacattttgataccacagcagacagacatggagacgcccaagaagacaggcttctggacgcagcacacggacccaagcagcggggtaagcgcttgcatctcctctatcgactccgctctaccacctggtcgtgttcgttcagctaacggatgcttttacattgcgaaattcggtgtcaaactttgaccatgaacgctagaggacgtactattacaacatggcgctgggtcggagctactgggagctgccgccggagctgcaggctcaagtcaagaagccgacgctggatgcactgcgtgagtgggatccagaggctgcggagcgcaagtacggcgctgcgaaccaacaagtagtcggcgaggacgaggagctccgtcgcaagcgggaggaggctctggccaagtcccgcacggaggccgccgaggctcaagtcgcatctacaaagctctcgctggacgagaggatggctctagctgctcagaagcggaaggcggcggaggtgcagaacagcaaccgagcgacttcatccagcagcaacgctgaaggttccagcgagtacctggaactggtgcggcagctgcagcagaacgacgacggggaggaaggagccggcggcaagtggctagtcaggtagacgaccgagagacgagagcagatgaagccaatagtttattcctgagcgctcgctgtgatgcctggccgctcgtctccgttcttacagttttttctctctctttctcttctctaagaaatccttgatgcgtgccgcttctgcaatgggaaatatatataatgttttgagtaattgttgcaatgtgcatgagtgggttttactgctgccgacgcacccgcttgtaggcctggtaccggtcctggaaggaaatggacttttcgtcgtgcgccgccgacggcttcttgggcttgaggtcgaacagctcctggacgaagggcatcttggccagcacgcacttccacaccaccagccagctgatggtcagcgtgaacagcacgatgcacacggcgcccgatacgtacgcgccggtcaccaccagctcctccagccccatggcggtctcccagagagtgattttcaatactgggcttctctcgaaagtgcgtacttaggcacgctaagttcggatcaacatggcttcaactagacttgatggagggcttcgaaatgcacgtaagagcttcaggctcgaggcgaagagcctctggataatggtacgatatgtaagtatctatttattgtatgggcggccacgtaggccgcaatacccgatcaaaaatgccaaaaactgaggacagacttgtcgtcgttcatagtgtacgccattcgctcacaatggcacccggagacattccaccgctgccccgcttcaagaagctgcgcttgagtttatcgtgggcctaatcaactagatcagagctcgtggtagcaacttcaaaacagcaagcggcgtctcgagtgtgcacgcattgctcccggccttgcccccatgtactgcgacgtcctccgacaggtccactccagcatacgagcgcacttggggcgagcgcgctttgccccagtaacccccctcggcggatcctccaccaccatgcgaagcttcttcctctgctccatctcgagctgctcccgtgctcgttgctgctctcgctccaactctcgcttggtcttccggaataccagcggcttagctagtggcttcgcagcaggcgcagctcgtggaggctcctggatctcgatcgttcttcgactggggctgcgcgctcggggcatctcgcttatcaaccgagtgcaagtctcctggtgctccagcgtcgccagcgtgctgtgcagtgctcgactgtgcagcagcagccctgacatggagtgccacgacctcctgggcgccaccttcgatcgtctgtgttccgtcataatactctagtctatgatgatacgcttggtaaccttgaggaagccggaggcagcagcaatacacaacgatgtcagtcgagctggatagaagcagcaaggaggagcagctatcgcatcgttcgcacctgttgcaaggaaagctcagtatagcgccttgatggcagctcgacttgaagcggcgataggttggagaggtgcagactcggtggggtgactccggggtgggagtttgcactctgcagctgacacacgaacgagcatttgacgttttgcgtggagcttttcaaagttcggatgtttgaattcaaattgaactgcccgcgaacataggaatggcgtggtacacatgacatcgttggtggtccacataaccaaaacttaacgcgcacttaagggagcagacccccccctactctcgccatactgaacgccagatattaatacgttgatcgatcgatacgagaagaccgaggatggaggcgctgcaggacaagaaggtggagttcttctccatggagaacatgaagagcaacgagaaggccgtcgagtacgtgcacacgtccatgtgcgtcatcgccggctgcatcgcgggcatcacgggcatgacggggctgcagggcttcgccttcctggccgccgcctacgtgttcacggccgtggcgctctgggtcttcaagctcggcatggacgtcaaggtctacttcaacacgagcgccttctccttcatcttcgcgggcgtcatgtcccaggcgctgtccttcatcctcttctggacgctctcctacggactcgtgcatatttattgaccgatcgaccgacccagctccagctccagagtacccaagctacacacgtgcaaccccaagcaaggaaggacccctacagatacaagatagcagtgcaaaacgcagcgttatagtgctgactcaagattttaatgccgtttggtgctcctgcttgtcgaacgactgcaccactagaccgaccccaccattgacgtcttgctttgcgtacttgatgcggtgtgatgctgtgtccttgatgcctacaattgcgggggagtgaagctaattcagcggcttgaaggacaccagcgcaacgtaacgcaacgcaaactcttgtttctggcctatattgtagaattgctgcagctgggtgcccccttccattatcggggggtctatttgcgctgcgcctcctgcatcttctgctgcatgatcatgagcacggcctccagcatgttgcgcttgccctcgatgacggtcttgagctggtccgtgttgctctgcaggaactcgactttccggtccatgaactgctcggccttctccaccgactgctccacaaagtagccggtgcccacgtccacgagcacctcctccttgctggccaggtggccgggcacgaacatggaggcggtcagcggcacgagcacctccttgctcaggtcggcggccgccatgctctggagcgcgtccttggactcggagaagcgcgactgggcctcgcgcaggccgccgaacgacgccgtgagctgctgcagctccttctccagctgccccttgagcgcgttgagctgctccagcgacaggtccacgaggttcacttcgctctgcgcgtccgccatgtcgtcccgatgatactctggaaatgcatcgcccaccaacgaagagcgggagtagtatcctggtatttcagccaatcacgagcgttagaatggatttacagccaatgaggaggcgtaacgaggaatttcgggctttgtttttaccaattacagtgcggaacggggctagtccgagtcgctcgcgtcgtcgccctcgtcgtccgtgcccaggaagttccagagcttcatggccacctcagcagctcgctcacgtcgctgctcgtcagtcagatcctggccttggtcgcgcacgttgcgaacctcggaaatcagcgcgctaaactcagccatgtcaatgtcgtcgtcgtcgtcgccaccttcacctgcgtcttctgagccagcaccaggacctccagcaatctccagagcctgcaacagtgcttgcaacctcgaatcatctgccgacgcgtcctgctcctcagtagttgcagcagtagcctccaccgtcgcagtcttgcccttgtccttgtcctccacttggttgtcactcttctgctctgcgtcaacctccttcttctctgctgccacctccggagccgcgtccttggacttcgtatcctcaaccttgggcgggttcatctccatcgaccgccacatgttgcagtgcagcgcctccagcacgcgctcgatgccgtgcttctcgtcgatgacaccactgtcgtcgtcgtcgtccaccgcgggctgctccgcatccaggtccacgaactcgaagccattgtcctggcaccatccctccatcttcttgacgctctcgcccgtggccgacgccgtgctcgccgccagcagacacacgtcgtagggcagcgtgtccaccacgcgcttggcgaagcgctgcacgtgcaggaagctctctcgctggccggcgtccaccacgcacagcagtgcctcgtagtcgtgtagcgcgtgctgcagcgccggcttcggcgcgttgtcgcgcacctggtgcacgtgcacctccacgggcgcgcggtagtacttggtgcgcaggttcagcagcgtcgcatcgaagcccttggcgtccagagacagagcctcgtccccactcagctggagcagcttggagactaccgcccacttgctgtccgggtcggggcccagcaccaacagccgggatacttccgccatctcggttgattgatacagtacgtgagctcctcgtgcctcttggcgccgcttcagattcaaaagtgatgtggaaaatagtccggcgggctggataatttagagctggtctaaaaattggtaaaatgcgacgactttattttggtccattttagtgccacttcaacttgagttgacaaattagtcgctcgtcgtcttgatctgcactagtgttgggggacgcacgtgccgcacgtagctagctgttacctggggacgcgacctcgagcggttaatgtccgcagccgttttcaccagtaggagcagattcaagacgatcacgacataatagaaggcaacattgatatggggttgcaccctcgatgcttccacgtgcgtgacagaaacagcacggcgtggcagtcgcctccctggacatcggcttcatctggtaacccgtacttggggtctccgacttggtcggctgggtccactcggttgctggaactcatcatttcctccatttcggggaaaacttcgccgtcttcgagaaatcgcttgacgtcgtcgtcgtccgtgttcagccacttgccgttcttccgtctcgctaggtagagcgtggtgactgtcgtaggggctgaggagggcttggctctgcatcgttcagctcttctcaccgctagctggaaaattcaaaactggccaggaggaagcaactactgcttgtgtacccaagcaaacttgaacgtgtagtcggttcctataaattacacacacagagatgcaagatacgtgagaaatagaatactatgtcgtacatgttcgacgtacccaattgagggatagtggtctgtagaaggagcacggtaaatatcacgatcttgcattggattttaccccaattgctggaaaccgcgaatccaagttgttgtacgggaaaattgtaggtcatcttgtgaagcgtccaaatcaatgttacgaacaatatggtctccagcattccgtagatctgaatgtgagcgacaacttcccagaaaccagattcgtccagaccatcgaactgcggatagaatctgcggttgggccagtggaaaaggatcaccaagtagcagcctgacacagaatgttagtggcggaaattgacacaatacactgtaaaaagtaggttggttgcactcactgtacgccgcgggtatgagcgttttcaatacttccgtcagcaagaagaattccataaagaacatgatctgcagaactttatgaagcaggaaatggcgctgctgaggcgtcatttgctccacaagtgctaacgtcgtggaatccgaagcaacggtacaatttctcgatagtaaagtcggagaaacctttcttttctcaaaagggcacgttggcacaattccagcattgccctcaacctgaataggggctactcgtgtgatacttgacaaccgcgagatatagttagttgcgctttcctttctctgcatcgaaagcttagacgagcgaaagatatccgatttggacgggaaggacctcttaatcaacatgggtcgctcccccagctccgggtatttcaatgcaaccatcagcgcacaggcgatggcttgatctgtactctcgttcgtagcatctctgatgccgttgagcatgagtctcagatcgaacagtgaagccaacatctgcataaagtcgactacaatgagcatggcactgcttttaaccgactggaggttctgcatggttgacgagatgaatagcgcgttagtgacgtccacgttgaaggtaacaagctctggcttgacgtcgtcctgcccacaaagaagtcggcaaagtacgttcttctgaatgatcttgaacactggcacaagtacagctgcaggggtctgccattcggctggaacagtctggaaaatcacattgaaggctacgtacaccaagcccgtcgacgttgtcatgatcattattgtcgcaaaccgacgtacttcgcttagaaccttggggttcttgcgcaggaattcgcctttggacaacttcagcgacagtgccaaggtccaaatccacgggccagacacgaaaatgagcgtgaatgggagcgggtaccaaagcagcagtatcatacacagtgcagatccctcgacggctatagcggcagttattgaagaaataattagagtgcgtctggagatctccagctctggcacatactgaccaagcatccacgagagcgagtacgaatcaaagagtgttaccaatactccacgagcccacaccgttccgctgtgagccaaaccgagatcgggcgattccaggggaaatgcgtcaacaaccgccgcacaaagtagaggaagtagcggaatcgcgcccaatatcatcagcgagcgtcgaacgctagtcgattcacgatatttctgcatggaaatgaaccgctcgaccgagtagcttccgtgcagttcgacttggatagactcccatcttcgtacaagcgcacgaacgccagcgccaactcgagcttccattgctgcaacttgatcgggaagaccaaccttcaaaaggggttatgaggggggaagtgtgtatttatggacgtatactactaaatcggcggtatagacccaagaagagaacgaaaggagcactgaaatttattctgcgcttcttttagctttgctaaacaaaatgttccattcactgcagacaaccgtagagactttagtatctgggtatccactcgaacttgaacgtgtagtccgttcctacacagttgaaacaaattagacgaagaagatacaatttgttttgaatccatgctactcgacgcacccatttgcagaattgaagactggagtagcgctatgatccagattagcagtttgccttggattttgccccagctaatcctgatggcgtatgcaagttgttgaagcggaaatcacaataactaggagagcgaacgaccccatctccaataatccgtacacaagcgtgatacagatatttttccagaactgagcttcgtctaccccgtcaaactgcaagtgaaaacacacacacgcgttagcagtagtaccacaatatatggaagcttacagtacagtactcactgtacatcacgggcgtgaacacttcaataaactccgtgagcaaaatgaatccgtgaaaaacaagatccggagaactttatcaagcagcaagtagcgctctctccgcgagatcctctctatacacgttgcactattgacgccacgttcgactgtatacctccccttcggaaaaatctgtgttccagaaggtgaacccgatatgcctctggcattctttgcaacaggcatcggtgctatctgtgtcaacctcggcccaattttggctaaagtcttgaggatgttcctccggtgatataccgtaaaagaaatcagccttcgactgagttaaactgtcggtcgctgaccctcgatccacaaactccgggcacttggttgcgattactagggcgacattcacagcttcagcggtgttgatccgcatcttcgcagttattccctccaagctcttcaacatgagcattagatcacacagcgacatcatcaaatgccccagatctatcattatgagcaggatgctggtgctgatggacgtttctcgctccatagtcgacgaaacgaagaacgcgctggagatgttgaggtcatctcaggcaggacgtcgtctcttcctcggagaatccgccgcagcacgttcttctgggtgattttgaatatcggggcgaaaagtgcagcggcaggctgccagcggacggggacactcacaaagataactttaagtgccgtgtacaccagcacggtagacgtttgcgttatcgaaaccacagcaaaccgacggacttcttgcaaaactttgatattttctcgtaaaaattgtcctctgacgtcagaggtatagcgccacagccagagtgaaaatccatggaccggacacccacagcaccgagaatggcagcgggtagcaccacaacattgccagcaacaataccataccgtgaattgttatacttgcaacagctgatgccaacaataacacgcgtctagagacttgaagctcgctcacatagtgacagaatatccacgagagagcgtaggactggatgaaacctgctaggaaccctcgaacccatactgtcgcactgcgttcaaacccgaggcttggcgactccagtggaactgcatcgataattgccgcgcaaatcaacggaggtaatggggcagttgccaatatcccgaacgcgcgccaagtactggtgagtttgcagtatttctgcatcgaagtgaaccgctcaaccgcatagctgccatggagttccacctggatggactcccatcgtcgtaccagcgtacgaatgacagagccaactcgagaaggaattccactcattcaccgcaacttgatcgataggataggtaggagttaggtgaagaggagtatttagggatgttctacttaaattggccaattctgaaactcaaagagatacccatcacggcgagtacaatcgttatttagtgtatagtttacccttccttcaatgctgtctgtctgatgcttctcggatagtcagggtacagacttaaccgcgtcatgagctcacaaatttaaaggtgaaatcgacgcctgtaagagtacaacacgttaggtacgccgccatttacctgaaacattcaaagtcaaacaagtatcttaccgaaatgcgtcactcgaaagcacagcgtgagcatgctccacaccatcaatttgcactggatcaggaacatctgcgtctccaaaacgaacgcgagatgatcgatcattcgcatcccgcagttgcgtttaatcaccactgcgagcaccgcaaacgatgaaacctgtagcagtccaaacacgaaaaccgaaagtactgtagcccccacactctcacgcgtgatgcccgtcaattctgcgtggtatggcgcactggggaagtgcaccatcagcagcatgtagccactgtaaagcaccggaaccacagcttccagataggcagtgacgacgacgcactccatggtgaagagagcctccagcgcttcccacagagaactcttctttcttgttaaatgcaacggattgaccacaaccgaagcaatgggatggatttttcgcgcgtaagtagcttcgtcttgacctttactttgacgctggatgttagcgcgtgcttcttttacagagatctccagtttatccaaaatttcttcatcttctggtgatagttggtgcggaatgctagagcgtatccgaatactcgggcagaactgcttgtcgtacttcacatgatctctacacaccacggcggtggagaccagaagattgccattccgccgactagctttagccattaactccatactggttcggatcgtcctggtcttgacgtgtagcccgtaaatcgtgatagcagcctgggataaatccgctatagtcattgtggtgatagcagcagtggaggacgcactctgcatacacgtggccacgtagatcgcgttgaagtagtccacagtgaagatggcagtttgcggcatcatgtcttccaagtaaattgtgcatcgcagcaccatattcttggcgaacactttgataacagggagaagcagtatgaccgaaagttgatactgcgtgccttctgcaactcgaaacagcgcctcgtacgctggatacgtgaacaaaagtgtgaattgtatggtcacaaatgccatgtagcgaatgagctggtcccgttgtgaaagcatttggtggaagatgcgagctccggccacaatgcggaacacgacgatctggaccagataatacattggaccaaacaccagcacgaagaacggaacgggaaacatgaaatgcgccacgatggggagagtacaagccgtgaatatggtcgacgtacacccggccacgagagttagctggacctttgagagcgacacgccttggataaagtacgggccttggccgacgttggttagattcaccacgaacgcgacgatggtcaggcggatccagaaaccgtaatttacgcgccagccgtcggtcgggtcttgcagcgagtgccgatacacacaaggagcacgcgcagcaagggtgcatttcttgtgtacgcttcgagtgccagcagtcggtggatggagtacttgccgccgtggtagctgacctgcactcgcttccaagccaggagaagccttgacccgtaggtcactagcatcgcccccatagtggagagtttggagacaatgcagcaacgcttggacacctatttatggaggctagctgttgagcgtaaaggcaaatgcgtgctgagctttcaggcagttagctgtcagtgttagatcagttggtttgcgttggtacagattcgggatgaggacgcgagaaagatataacgaaggggcgccatttgttcagaatattttgtttcaccaaaccaggttcaaaagacccactcagtgtatgtggatccactcaaacttgaaggtagtccgctcctaccggttgaacatgttttcaacaaaattttagccaaacatgctaggcgttcgacgagaggacatggagaagagatcggccttcgattggggcaaactgtcggatagtacaaatattgttcggcctcgtagatttgggtacttggtcgacgagatcaagaacgcgttggagatctcaacgttcaagatgaccatttcaggaatgacgtcgtcttttccgtccagaattcggcgcagcacgttcttttttgcgatcttgaacaccgggacaacaagcgcggcgaccagctgccagcggattggaatactggcgaagataacgttaaaagccgtgtacactagcactgtagtcgtctgcgtgaagaaaaccactgaaaatcgacgcacatcctgtagaactttgacatgtctgcgcagaaattcccccctcaagattccaagagccacggcgagtgtgccagcccaaggaatagatacccaaatgagcatgaacggcagtggataccacagcaaaaaggcgagagacgacgtaaaagcgttgatagctacagtcgtcgctgtcgctgcgaacagtaattagcggtttgatagttgaagttccgtcacataatcccaacattgtcacaagatagcgtaggactggaagaagcccactgccaatccacgaacccacagcatcgagtttaggcaaacccgagatctggtgacactccgaccaagcgccttctgcgaactgccagggttaacgaagaaaaagaagaagaagaagaagaggaagagagaggactcgagtggctgaagaagttggtgcctcaggcgcttctgaaaaaatatcagaaagtgactcctcacctgacgaagctcccggaggagcacgtggctaacctgttggcgaagacaagacggagctccgcacaacgactttcagagactggtacaaggcgggcctcgatgcaagtcacctgaaagacgtattggggacggatgcagcctcgatgaagctgcttcgaaggtacacgaagttcctatcttcataatagggggcgcgtttcgaccgactgaaggacgtacttcaagtacatttcaatccaatggcagactttgagttgaaaaaaaaattgtagggagaatgtccttttggccttaatgcttgtgtatcgattgaaacttggaggtgaagtctgtgcctgaatatttacacacacaccgccattattatagagtacgataatacaatgtgaacatcagtcaacgtacccaattgaggaatcgtcgagtgcaccagcactagcagccaaatcaccagtttacactggatcgtcccccaatttcgattcaccgcgtacgcgagttgctgcaacggggacttgtaggccattttgtggagcgtcactatcaacaccacgaacaacacaacctccagtatcccgtaaagctgaatgtggccgatagtaaaccagaccgcgtcatcgtcaagaccctccaactgggaataaaatctgcggttgggccagtagtagagaatcaccagaaaacaacctgacgataagcgcaacggttagttttcaggagcatattacggctaatgagccacttactgtacatcagaggtgtgagcgctttcatgaactcgctcagcaggaagaattccatgaaaaacatgactcgcaacactttttgtagcagcaagtggcgcttctcaatggttcgagaactcactccagcgacacttttatccgataataaaggtggagatggtacgacccccatgctgcttccaaccggttgaggggaaacttgtgctctgcttgaaaatttcacaatagcgtcggtagttattgcagctgtagatactctgaaaacttccgccttggatggaccggatattgtgttttgttttgccagctccgggtacttggatgcaatcatagccgctctggcgatggcttgttcggcttcctcgttcgtaatatctcggatttccttgagcatagccctcaggtcgcccaatgaggtcagcatctgcataaaatctagcacaataagcatcgcgctggtattgcaggactggagattctgcatcgatcacgagataaacaacgcgttggcgacctcaacgttcaacgtgacggtctcgggcttcatgtcatcttttccacagagcagccggcagaacaagttcttctggatgatcctgaacactggaatggcaagagctgcgagcgtttgccacttggttgacacggtttgaaagataatgttgaacgccgtatacaccaccgcggctgacgtcgtcatgatcaaaatggccgagaaacgacgcacttcgctttgaacttctggatgtttgctcaggaactcgcctcgcattagtctcagtgatactgcaagcgtccctagccatggacccgaggtccaaaagagcgtaaaaggaagcgggtatcaatgcaacagcatgaagcccaaagccgcgatgtggaggactgcaactgcagctattgcagtgaccaataggttcattttcgacagtttgagctccggaacatagcgagaaaacatccacacgagcgcgtaggagacgagaaagcccacgaaaagcccccggacccatagtgttgcactgtgcgccaagccgataatccatacgcaagggtcgagaagatatttttccagaattgagcttcatcaaaaccatcaaactgtggatagaactggcggttgggccagtagaagaggatcaccaggtagaaacctgaacccagcactcacaaggtcagccttcgtatcggaaaatcctgaaaacattgagctaccggtagcacgggcgtgaacacttcgataaattccgtgagcaaaataaactcggtgaaaaacatgatctggagaactttgtcaagcagcaagtggcgctccagcgtcgaaatccgcccgattgccgctgatgcatttgtgcatctctctatcggcaatacttgagcgacttgtggcagtatctgcgccacagtcggtccggatttgttgttgcttggtcttcggaaagtcgccaagaccaagatgtcagcctttgtttgcgatacgctatcggtcaatgccttccggtccccatcctccgggtatttcgtcgcaatcgttagcgcaacagcgacagcttcagcggtggtaatgcccattttgttaacgattccttcgacgctcttaagcataagtattagatcacacagcgacaacaccatgtgcaccagatctatcacgataagcaagatgctcgtgttgatagacgcttgccgctgcatgttggacgaaatgaagaacgcgttggagatttcaatgttgaaaatgatcatttcaggcttcagatcatcctttccgcggagtagttggcagaaaatatttttctgcgtgatcttgaatatcgggatgataagtgcaacgacaggttgatactggatcggaacactaatgaagataacgttgaacgccgtgtacaccagaactgtagacgtctgcatcagcgaaataaccgcgaagcgccgaacttcacgcagaactttggtgtttccacgtaaaaggtttcctctggaaagttttaacgccaacgccagtgttcctatccatgggccagacaaccagagtgtcgtgaacggcaacggataccacagtaaagtaaagagaccgagtgcaatgacgtgaacaacggcagctgctgttgtcgaggttaacactagaaagcgtctggaaatttttaactcagccacgtactcattaaattgccatgagagcgcgtaggagtttaagaacaccataaccatcccacgaatccacaacgtcccgctatgcgctaagccgagatcgggtgattcgagtggaaatgcatcgacaagtgccacacaggtcaacgtcgggaggagggtagtcgttaggctaaccggatttttaggtcaatcctacattttggtcacgggtcaaatccttactttggtcacgtgacctaagcgaatgaggtcacatgtaattcgcaaacggtttggttgtcaagtaaatgcgttatagcgattctgctcctgacagatagcgacttccgcaccattattccgcgctgtcgtagtcaaaagagtcgtctggacgatagtctgctgtctcatgatccatctcggcatcgtcggcctctgaacccacagcactagagcaggatccagggtcatcagtggcgatggtaggctgctctcatcagtctttgctcttctctgaccccacaatgtcggcggcctgacgcagttgaggcgcactcggcagctggagacgtttccgccgaggaggcctaccgagcctggaatagataacaacgcgcggtgccgcatattcgtgagaaataccttttcgtgaactacattacgcgatgggggccgtctcatgttgaagtgtcaagctcgagtgtcaagctcgagtgctgagctgtggtgcgatgggctagctacttctaggcgcgtataaattttctaagtgaatactacaaagcacgaaatagaatccggagacgatgtcgaaatttcataatgggttccctgtgtcgacgaagttgttcatgggagggtgagccggttgcctcgctattacactgtgtaatttgtaatagttgagttgcgttattgtgtagaatgaaagctaggtgcaattctgtatggtatgcggctcaaaatatagcatggtactactagcagtgagatatggtaggcaaatacatgataagtgcagtggaggtttccacagaagcgagcccagcccactcatcgggggggtcggtttggtagaagacgctggcagaaggcgctagcaggagtcagctgaaacacatacacagattactttgaaatcaacctcttaagctaaacagagctttggtttgctcggagcgctagcctccctggtcctttataatagtgttccgaaacctacttgcagctctgactcttcgctacaaatacagtcgttatgcctccgagacggccgagtcgcgaggatctcccccgcttaccgtcgcggtggacaacagtgctcgcgtccctccaagccgaagctggacgctcgaccaccggaccttcactctcactggcacaccgtagcaagtgtgcatatgctgtcaccttgcaaggtaggcagagtgaattgtaagcgctggaggatcgggcatttgctaggccgttagttaggctaaatgactgcaatgcgccgcaccttgaaacgaaacgagacggcgagtcgagtgtgcggccaaatctgtgcagcatgcccatggccttcggcaacgctgtgatcccaggaacagcgggcggcggggtactcgacttcgacctcgagcgaggttacggggccccacacgtcgagcaagactgaaggctaggtcgagataacgctacgtgacgctgagtccatgagctcaagcgctgaatgcgagcggagtcccgtgagcacgggttggtgactttgtacggtgctcgtactgcaacatggtaggtagaattagtttaccccaacagggctgtcgaatttggattccgcggccataattgagttgtccaagtggatattaccataacttaccgtagctagcgaaaccgcatgtccaatcaacttttcttcttctgcaagcaccacctcctctatctagggtattgcgatctgcgctcatactacgagcatcacacacgcgtggtagcagctcactgtttagcaatgtaactactgcccgtgcaacatgcatggtaggcggtctcttgcagtgtaaatggtaggaagcacacattttagcatggtaaggacttgtagcgcaacatggtacttttactagtagcaagcacgttgtgcaagatgataggcagcccacagtgcagcacttagccagcttatactgtaacacagcagcaagcagcacgtcgtgtcctgtaggaaaccgcgctgacagtgtacgaaagcattgagggaggtgtcgtgtgtactgagaaaacttgtatgatgtctgaattcttcaggctgaagagaagtgggccctcgtccgcttcgaagctgcatatgcattttgatctcattctctcgcgggcgtgcgcgcatcttaccgtctacatcaatgggtgtgacctgttaagtttggtcacgtgacctagcgtcctgatgtgtgacctatttgaccatcatacccgtgaccaactgttaggattgacctgttttcccctcttcggtcgttagcaccataaacacccaccaactgctggtcgatgtacagaacttctgcgtaaccttgaagcgctcgatcgaatagctcccgtgcaactcgacttggatcgactcccatctttttaccagcgcacgaatacgtgagcccatcctctgtcgtcagggcaaccagcctccaaagtcaatagagatcacaggacgcgggtatttctggaatgccagctatgagcaagaaattcacgtttgacacttttaaccttgatcaaaagtcaattcaaaggtgtaaactttgctattatttgttgttttatcctttagtgatcaccttggcgacatttctgaaggtacagtcgacgcctacaagaagcgaaaaagcaacatgaatgtatagaatttgccatgggttccatcgacaaagcaaacgtaccgaagtgagtcagtcgcaagcacagcgtcatcaacatccacagcatgagtttgccttgaatcagagacatctgcgactccaacacaaacgcgagttgatacatcgctcgaatgccgcagttgcgcttcagcatggcacataatactgcaagtgacgccacttacacgacaccgaaaacaaaaccaggcaggaccgtagcgccgacattttctttcatgatgcccttcatttccgcgtgatactgagagctggggagctgtgccatcacgagcatgtttccaagtaggatgatacgacgaagcattcagcggtgaagaggctctccagtgccttctgcaaagtagttccctcctgtggtgagtctgtcgaatccgaagttaaataaagggataaataagcctttgagtacaacagagcccagttcggtgcgaggatgacgtagtagtgttccttggagacccggtgacatcatctttcgttgttcgatcggcttcatccaggttagccaacaatttcaagtctgcggttgataacttgtgcttaaggcaggaatttttgttgattttcccacttgaatactgcctttcgagtgttccaggccccctgtacaatgaactgataagagatagcataccgttttccagggttgaattggtaaagctccgaaagcatagttgcagtgcgccaatataggccgtaaagcatggccatcgtttgccctaaatcgacagcaacaatcgttgctaccgcgccagctgaggtcgcactgtgcatacatgtggcgacgtatatggcattgaagaaatcgaccgtgaagatcacagcttcgggtaccatgtcttccagatgcttcacacaccgcagcacaatattcttcatggtgaatttcatggcggggagaaggagaattacgtgagtactgaaagttgatactgcgtcccctgcgccgctcgaaagagcgtctcgtaggctgggtaggtgaacacgagcatgagttggctggacgtaaaccttaggtactgcatcgcctggcccaaactggcaaatgtaaagcaatggagcgaataccaagatgaagaacgggacagggaagaccgagtgggctacgatggcaaccacacacacaatgaagactgtcgatatggatgcggatagtaacaccaactgacgtgttgagatagcaacaccgtcaatgaagtatggggcctggccgaagatggtgtggtttgtcgcgaaagttgctactgtagctcgtatccagaatccggagttgacgccccacccgtcgttcaggtcttgaagcggtacgcattcttgcagtaataccactgtcgccatcggcattggagtcgcgatgcaaacgaagagcgcgcgcagcgatgttgtggttctggagtacgtatccagagctaggagtcggtagatggagtacttgccgccgtagtagatgatttgacgtcgcttccaagcttgcaaaagtctggcggcaccagtcgcgagcacagccctcatagcaattgtgtcccgaaaactatggacaccattagcgtccaacacagagcgcaaggcagcgattaaaatagttttcattttttattttggtggtgctgtcagtataaaacccattgtgggttttattctccactccaaatgatgcacgattcaaccctccaacgtgcccatcgaacttccgctagccccgcaatcgcattgtggtgttttgattgtttccaactaatcgctctcgagctactcgtaaaatgatgtttagtaaaataatttttatcgaggtaggattagcacgcccgcgccgtacaagtgagtgaaaatacgcactctaggtgacagctccatttgagccataacaaccaaatcatagagtgtgcagctttctgtttgtaccgcaagtaacggtgggtacagtaagtactaaacttcggggcttcttcgtgcattgataccataacgcatcaggctttgtgtatccactcaaacttaagtgtgtgagtccgttcctatatcaacaacaaattagaaaagtagttcatatacgcacagcggttcgcggacgaatgcggtatagctccagcatactttccgactggcattggggctatctgtgccgcgctcggcccgcatttggttgtatttctggtcgaagtctttcggtgagatgtcttgtagcgctggatacttcatcaaaaccatttgcgcaatactgacagcctcattgctgttaactcccatttttgcaataataccttccacactcttgagcataagccttagatcccacagcgatagcagcatctgcgccaaatctatcgcgatcagtaggacactggcgttgatggacgcttctcgctgcatattgaatgaaatgaggaacgcgttggagatctcaacattgaagatgaccagttccggctttttgatcatctttcccttggagtagtcgacagaaaatgtttttctgggtgattttgaacaccgggacgaagagtgtagcgactggttgccaataaacggggacactaacgaggataacattgaacgccgtgtacaagagtagcgtagacgtctgcatgagcgcaaaaaccgagaagagacgaaaatcttgcagaacttcggggtgttcgcgcaagaaatctctccttgaaagtttcagcgccaaagccagcgtaccaatccatgggccagctaacaagatcattgtgaacggcagcgggtaccacagcaaagcaaagagaccgagcgcaaggacgtgggtaactacagttgctgctgtcgctgttagcacgagggcacggctggagattttgagctctggcacatagtcggaaaactgccacgaaagcgcgtaagactggatgaacaccaccggcaacccccgaatccacaatgttgcactgtgggctaagccaagatccggtggttcgagcggaagtgaattcacaattgccacacaggctaacgttggtagcaaggtcgctaccatcaacgctagcgcgtgccaaattttggtcgaggcgcagtagttctgtgtagacgtgaatcgctcgatcgaatagctcccatgcaactcgacttggatcgactcccacctcttggccagcgtacgaatacttgagcccatcctagtcttcgtggcacccagcttccaagtcaagaaagctcaggacgcgggtatttatggatgtatcaacaagaaattcaatgttcgacacttttaaccttgatcaaaagttacattcaaagataatttggctacggatttcctgggaacatgaatgtgtaaactctgctattatcttttgtcttatcctctggatatgaacttgtcgagattctgaaggtaacaacgacgcttgcatatagaagtgaaaaaaagtgaataatacttctaaagtgtataattcgccacgaattcggcgcgacaaagcaaacgtaccggagatagtcggaatcacagcgcatgccgcagttgcgcttgagcatgacaaatagtactgtaaaacccattctgggttttactctccacttcaagttcgagcccaaaatgcagaaaccacacagcccaatctacctaaactcgggcaatcttccctcattttacccaaaatacacaccctccaccgccaccccaaaaatacttatcggagctcctcgtcacacatattcctgcgtgacatggcttcactacgagcaccacctcctcctcctcctccctcctccatggccgacgactgcagcacaagctacgagcagctgttccggtcgctggtgcggcactcgcggctcttcccgctacgcagctcggacgtggcgctgctcccgtcgccctcggccttctaccggcagctgctgcgcaacatccagcacgcggagcggcgcgtgtccatctcgtcgctgtacctgggcacgggccaattggaggaggctctggtggacgctctagcctccagactacgcgaacgacccgagctccaggtgcaggtagtgctggactactcgcgcggccagcgtggggggctcaccgccagctccgtgaccatgctggcccctctactcaaggagttcccggacaacgtggagctcttcctgttccgcgtgccgcagctctcggggatcaaggccaagctgccgccgccctttaacgagacgctcggcgtctcgcacgccaaggtttatttagtggacgacacgctcgtgctcagcggcgccaacttgagtgacgactattttaccaatagacaagacagatacgtgcagctgacgcagtgcggcgggctggcacagttctaccaccagttcgtggagctggtcacgggcttttcgtacaaggtgaagctcgagacgctgacgggggagaagaacgactacgagttgattgaaccggtgctggcgcacgactcggacgaggccaaggcggcgatgaggaaggatatggagagcttggtggacccggacaagcaccacgaggacaaggaagacgaacttaccgacgcgtgggcgttcccaacactgcagttcacccccatgtcgatggaccatgacgaacgtgtgctgagcatgttcgtgaagaatcttccgcgtggatcgcagctgcagattgcgtcgggatacctcaacttcccgccgtttttgagtgacctgctggagaaatgtgatgctggactggacgtgatctcggcggctccgcgtgccaatgggttctacgatgctcgcggcgtgaagggagcgctgccgatggcctactcgctgattgagcaggatttctttgagcgcacgctcggtcgcgagttcccgacggtgttgagggagttcaaccgtcctggctggacttttcacggtaagggcatgtggtggaggccgcctccgctgccggtgaccaacggatacaaggcggagctgggcttgccccaggtgaccgttgtgggaagctccaacttcggccagcgatcgtacggatgcgacctcgagtcgaacctcgtggtgttcacacgcaaccctgatctgcagcgtcgactgcaggacgagtacgacgcgctgactagagactccgaggtcgtcaccgagcagctctggcgacgacccgagcgcatgctccacggcttattcagttggaaggacggccactggatccgacccgtgtccaagttcattgccgcgtacctctaacaagctccgactttagagttctggaccaagtcgatagagctctacaatttttcattagaatagacctaagtttgccttgccgcacattgctatgctatgcttctcagagcaagccaccgactgtgagctgcaagaagacacctgagagcaatggcagggtcaagttgtcgtcccacccgccgatgtccagcagctcggcagcggcagcactcactcctgccgccagagtgatcgttcctgccacagctccaaactcatcgtccaccacgtcgaagtagaagtccctctccaccatcaacgctgtagatgtggctgcagcagtgacgcagaagcagccaatggatccctccagcgacttcttgcctccgagcgtccctagcaacgccaccagcttgtgtcggccgtacagcgtcccgaagaacgcagccgcaggatcccccaccgacagctacagcacaagagtcgaactgtaagaagtcataaggtcacaacctattccaccaaccaactcacgtgaagaatcgcgagtcttgcgactcgagggggaaacagagcgagcgagaagcccgagcccagtaagaagtagtaggccccaggcagcgccgccctggacacctcgtactgccgcatgatagagcgaaaacgcttgatgtacagcgtattcaccgcctcactgcgccccctcaactcgtgcagcccgtagaacagcacggcgaagaagagcagcaccgtggcgcccgccagtcgaccgaagaagctcgaagccgcgtagatcatggcccccgtccccacatgctgcagcttgcgctgcacgtgcaggtctccgcggtgcttgactccattctgcgccgcgtctagtggccgagcagacacgaggtactggaacaccaggatcgccgccacgcacgcggcgcaggctccgagagacactccgcgctccccatcgctggaggacatcgaggctgagccgttatcaacggatttgaggggggttaaacgtatctcctgccgaaccggcactactgtgcgctgcctaatgcacacgaggtgtcgtcaatttccagcgtagtatccagcgtggtgcacgagcgaagctgttgtgctagatgcacctgagtgtgtatcaccactcgatggcctcgtcaatgacgaggagaatccatggggtggagtggattctcacacgtcacagatcttattcctgcgacgtgtgagcaggttattctcgtccggtgcactgtagcattcacccacttccagccgctggaagtttcgtgggcttgaaggtttgctgcgcccaaatttacgcgttccctgcgagagactggtgggtgggggtcgtcccgatcagacggcccaatccacggcgccacgcgttctgagggaggtctccactatccatctccggcctgagttgcgcgtgcgtgcgtggcgcagcatgagttgccaagtagcggactaccgcctagtagacacggatagcagcagtcccgacaagcaggcggctatgatttaccccgcggtgagaccttccgccacttcggaacttgacatgggcagcgacaagtccgagactttgatcgagcgcaatggacgcagcgacccggagctgcagatgctggcggccgacgactttgaggtcatccgcgtgctcggcgtcggcacgtacggcgtcgtcaagctggccaagcacaagccctcgggcaccagcgtcgcgctcaaggtgctgtcaaaagagcacgtggtcacgacgcgccaggagaagcacatcttgagggaacgcgccgtgcacctgcagctggagcacccgctggtggcgaagctgcacggcactttccaggacgacgactatctgtacttggtgctcgagtatctgcccggcggcgagctctggagcctcgtgtactcgcacagtgacgagcaggatgaagaggtgaagaccacgacgcagttgaaggtgcagggatcgatgaaagacgccagtgacgagctccgccctgccacgccagttagagcagcaacgtcgacgatgtccgagtcgctggcacctattcagacccgaacgctggatgcgggaggcctgagcgttctacgcagtgagtttggggggttgaaggaggagtacgctgtgttctacctgggctgtatcctcagtgcgcttgagtacctgcacgaccaggggctgctctaccgtgacctgaagctagagaaccttgtgctggacaaagaggggtatctcaagatcttggatttcgggttcgccaagccggacgcgcagcgagctgatgatactgacgacagcagcgagcagacccagaacgctcggaatcttacactatgcgggagtatggactacatggcgccggaggtgcttctacgccagtcgcacgaccaccgcgtggatatctggtcatttggtgtcattatgtacgagattctactgggtaagacgccattctaccacgaaaacccacgcgagctcgggcgtagaatcaccaacgagaacgtcgagttcccgaacgagttcgaggaggagtgtccgctggcctgcgacctcatcactcagcttctagtgaagaacccggacgaacgactatcgtcgatgcagaagatcaagtcgcactggtttttctcgcgaatgttctcgtgtcctgaggactggcagcggttgcagcgtcgagagtacgacgctccgttcatcccggagctcagcgggcccttcgacacttctttcttccagaccattgatgatgattaccaagaggagctggaggcggatgtggagccctactttgaagatggctccaacatctttagagatttctagccgaccagctctcccaaaccttcttcgtctccgtattcacgtgttaaactgacgatccagctacgacaccagccccgcactccccgacactccacgaattcttcgtatccccattaatttatctggttagcacgccagcaacgatagaaagatcaattcaatagatagaaccaacaaattataccacggatcagcaatgtcattccagcagcgatctacgcgtcttgctcacatggatggttttactgaatcgcaataaatatactaccactacttgactctctctacactactactcgcgctgcggcgagttcacaaaatctctgcactatgcagcctgggtttctagtacccgaaatccgaatcggcgtcgctgccgtagtctagctcctcctcctcctgaacgcgcacaaagagactggtgtcgaaggggccgtccagtctcggaacaaatggaggctccacctgccgtgcctcgagctgctgccagccctgcgtcgacgggaagtagctgcggaagaaggtcgtcttccgcacctcgccaaacgacgcaagtcgaagcgctgggtccttttccagcaacttacggataagggaacaaacgttggcgtgtccttgctcatacccgtccggaaactccacaggcgccgagatgatgcggcgcccttgttcgcgattgttcgagtggtagaatggcgtcgtaccgaacaacatctcgtacagtagaataccaaacgcccataaatccactcgctggtcgtacggcttgtgctgcagaatctcgggtgccatatactccgcacttccgcacatcgtcgagctgcgttcagacgtccgcgttgcgttcggcttggacaacccaaagtcaatgagcttcgggtatccctccgcatccagcacgaggttctccagctttaaatcccgatacagcacccctttaccgtgcaagtgttcgagcgcggacacgatacacgccgcgtaaaatgctgcgtatttttcgtgcagtcctccgtgcgagctccgcagcttctgcttgaacaggaagttctccagcgtcaagctgttgcgccccatggccacgctgcctcctctcctctgtctgcactgctcctcatccgattccgacatggtcgtcactgcatcctccggttcctcctccacctgtctgcttgacctcctgccttcctcttctccctccgagtcttcgcagtcctcaccctcctccaagtggccgtcgtcgtgtgtgtacaccaaactgtagatctcgcctccaggacagaactccagcacgaagtacagcgcgtcgttgtcctggaacgtggcatagagcttggccacgaacgggtgcgccagccccaagtgcacgctctgctcccgcatgatgttcttctcctggtgcagctcgtgcaccaagcgcctcgccagcgtcttgacggccaccgtggcgcccgtgtccaggtgccgcgccagttgcaccgtgccgaaggtgcctcttcccaagacgtccagcagctcgaactcgccgatgtccgtggcgtgctcgagctccgacacaaaagaaggcctggccacggacgaccggcgcccagttttgacgctcacggccgccaggtagctcatggcgctgctgaagcgcttggccgcgtcctgcgccgagctcttgcgccgcgtggaggccgagaagcgctgctgcgactggtccttcttctgatgacgctgctgctgcttggtgaccagcgcgcggatttcgcgcatcttgctccacatcggcgccatggacggcggctccacggacggaaagacccgcatcgagtgaatacctgcggcccaagcaaggcgaggtcgaatggcgttgaggccaaaccgttatggcgactgtgcggtgcagtaaatatggagtgcagattgtgtggcagcaccgttctacgcacgttcgacgcgcgtgctgaacgtgttttgcttggggtttgtatgccttgcgcctgtcgcctgcacgtgacagactttaccgaatttcgccagagagtgtagccatctcatttagaggcacactggcagtgtgcgccagcagcattgcaaggctgctggcgctcactcgtaccattcctgcagcaggctgcgatggctgcagccggcgtcacgtggctttatatccgacggagctgtccggacgcttctgcattgtgcacctaggtgaagtggcggacactctcgaaggcacgcacgacacatgacacactgtgtggcggtgcaacttgctacggaagtggagagtttcagcgcgcgaccggctcctcggggtgacgttcaagtggatgagccgggccgatctgaaccagcgaaatcaaatccacgttgcctgctccgtagtcaatggggcggaccaatagccctcactcagtcaaaactgttcctgcatttagttggcgtaggcaggtcgagccatttcccagttctacttgtgcagatatttacatcatcaccacgtcctggcacgcgttggcgatgctccgcagctgatagtgcagcgcgacggctgtcggccgctcgtcggcgttgaacgagacgcactggaggatcaagtcgcggatctccggcggacagtcgtcctcgatcgtgggcttgatggcgtccgtgctcaccaacagcgcgatcttggcgtccgtgagcgcgttctcctcggaccggttgctgttgtacgggtggccgcacgtgtccatctcgctcagcaggatgccgaacgagaagatgtcggcgcgttccgagtaccgctcgccctgcagaacttccggcgcgatccaggcggtggtgcccatgcccccagtcatcgtcgactcgtcggacgtttctcgggagatgccaaagtcgctgagcttggcttcccacgcgtggttcagtagcacgttgcgggacttgatgtcgcggtggatgatcgtcgggtcgaacgagtgcatgtacaccaatgcctccgctgtatccaatgcgatatcgactttacttcgaggtcgggagctctccccgacccacgaaaaggtccgacgactgccctcttcactgcgtttctgcctcagcagcgtggtcaagtccccccttggcatgtactcgacgatgagcgacagatccatgagattcgtccacgccaagccgatgaagtgcacgatcttggggtggtccatgcgcgcgaacaagcggatctcgtccatgaatcgacgcaggaggtctttggacatggccttgggcaggatctgcttgacgaccacgcgctggccgtacagctgagcgagatgcacgacaccgaagcctccgcttgcgagctccttctggatgacgacgtcttcaataggcaggcggtacggaatcaagtcctcgtcgttccgaacgtcgttgctgaggtagccgctgccagacgaaggagggatcgagaccgtgcgtgtgtcggagcctgtttcgcccattttgctcgagtctagagccaggaaaccatcacccttggagtctccttgttggcgtctttgccgacgtcgccgatacaggataaacccgatgatcgcgagcaccacaacgacagcggctgcagctacaccggcgatcaaccccacgttggagcttgatccttcattgatcgtgacgacggtagttcctgattcgccagagttttgggttgctgtactcccagtgctggtgccgctgccttcgttggtaccggatgcggtgctggagcctgatgtggacctggtttcggtcgtggatccagagtcatcgctgctggtaatggggtacaggctcgagaacgacgtgtctgtgcatagtagaaatagtcaacgataagctcgtaaagcattgaggatggatggttcgtcctcaccgtcgagcacacaggctgaaatgctgtccgagatgtccgtgacggtaccggatacgctcgagcaagcgtcggaatccaggctcaccgtgaggctgagctgcgcgctctttagtacgtcgacatcggactcgcggatgatgaagctagtcacggttgttccgcctactgtcctgatagtccaatgcaaacggagtgttagttcacttgaagacaattcgacacgatgctgtgaagtccgtacagctttttgaggctggaagggaaggtgacgcccacgatctcggtaacacgacagtcgctgcactctctgttcgtcagtgggcaacagcgtcagtgaaacagcaaccaggatcgaacatgtaacagctcaaccgcacaggtattgcagactgtcggggaacactgcgccttccagcgtcgcgagctgctggttcccgttgagatacaaatactggagagaggacgagaagcggaacttggccagcgagtcgatcgagttcttgcgcaggtagagcttctgcaggttctcaggaaagtctgaagccttcgtggaagtgagcgcgttcagatccagcgtcctgccaccgaaagaacgagtcaagatgcacacaatcccatgagcaaatctacgcctccccatcagataactagcgaaaaacctttcaccagttcctaggccacgtacagcatcaacacgctcgaggggaactccaagccatccagcgacgtcaactggttgctcgtgatatctctgcaccaatatatacacccgtcagcattattctacccagcctactcaaagtctactcaacccacgcacatttccgtcacggacgtccccacggccttgaacgtcttgatcttgttgttccacaggcatctaccaccagcagcaccacaggatcaatacacagactcctccctcccccgtcaatgacatctcaacgtacagactcgcgacggccgggtagctctcgacgacctcaatgtcgacgtagctggcgttgatccggtactcgcccgggttctcggagctcgtggcttcgatcgtgacttcatcgcagtccgcgtctttgacgaggatggccacgtcgtccgcgccatcggctgctgctgctaaagtgacttctgacggcggtgcaatgcccgactccggacaagtcgacgctggctgacctcgaggcagcgctgccattgcacacgccgccgtcaacgccaacgcccacagcctcatgttactagtgggggtcgtttcggagcctgtggacggaggtgggggaatatcggagactgcggccggcagtccagtcccgatgggtaaaagagctcgtgcccgctggtaacgaccgaccatgcgtgcagtgcagtcacgatggggacaacgaagtgatcatatcccacacggaccaacagctgcagccatcgtttgctgaggcaaggtacgtggtgtatcgatcagtgatctcgtcctgctcgacggacgccacaccgtcccacttcacttcaacttgtacatgtatatcgatatcgaccggctaaacttcgcgccatctcaataagctaaggtagttgactatttctctcagttgttacagtgctctcctctctcctcctttgactccactcatcgatcatcacacataatacttgacgtagtctcggcgctccgcagacaggatggcaatgtcatcgtcctcgacgaggtgcaccattggcgggggtttgcgtccccgctcggaccgatgtgtgtggggcgtccgacgcggcgctctgcagttgtttcgaggcatggggttggacatccgccccgtgatggccaggtcgtccagcgccagctcgaggttgcgcagctcgtagtggagctgcagcgccgacgggcggttggccgggtccgagtccaggcacttgtccaccaggtcgcggacgctgttggggcagtccggactcagcgacggccgcaatgaaccggcgctcaccagcacggcgatgcgcgcgttcgtgtgcttgacgttgcccccgcggttgtcgtcgttcgggatgccctcggagtacgggcgtcgacaggtgtcaagctcggtcaggatcacgccgaacgagtacacgtcggccttctccgagtaccgttcgcccctcaatacttcaggggcaatccacgagatggttccgatctcggccgtcatggtctggtcctccgtgagctcgcgactgacgccaaagtccgtcaacttggcctcccaccgctcgctgaggaggacgttgttgggcttgaggtcgcggtggatcatggggctctcgaacgagtggaggtagacgagcgcctctgcgatgtctagagcgagcagcgacttgcacttgaggcctcctctttcggttttattcgagcggaaccagccgtacgagctgcgaaccgatgggtcccgcgtctcgcgcttgagctgcttctgcatgagcgtggcgaggtcgccgttgggcatgtactcgaacacggcggacaggtccatgagcgagctgaaggtgaagccgatgaacgtgacgatcttcggatgatccagcgaggagcacgtgcggatctcgtccatgaagtcgttgagcatccgcgggtcgcgcgcgcgctcgggtagaagctgcttggtgaccacctccttgtcgcggaaggtggccttatacaccgcgccgtagccgcccttcgctatcagcttgccacgaatgacttcctcgtgcatgagtcggaagtgccgcatctcctgatccgtgcggatgtcgttgtctaaatgcctggctgagatcacgcgcgtcatgttggacgaggtggtcgagctcacagtgctgttcatgcctcggcgcttggtgctcacgatcgtatcctccatctctgactgcatttccacctccatcatgttcgtattcagtgtcctgtcgaagaacgtgtgcgcggtcgggttgttgctggggacgatatcgtccacagaccggaatccagaggttctatccgccgtgtagtccttaaacttctcgttcgtccgacggtgacggaacacgagataacccacggcacctccaatgagcacgagaaggagagcggcacctgagatcatcgctaccaacatccaacccgaagacgacaagctagtggaagcggaagtaccgatatcctgcgagccattaggcggtggtggaagggctccacttgaatctcgcacagtcccggggatcacatatttgctgttgtaaacggcgtcaggcagcacgcagaccgtcacactctgcaccacctccttggtagcactcgagtcgctgcaactggagctcgagacgacgagtttaaacgacccaagccccgcaaccagcggctccgacgagtgcgcgatctcgaacgagtccacggtgctgcctgagaggtcgagcgcggtcaacgttccgcccgatggcagcgtcatacctgacagcttggttacgccgcagttctgacacgaataggcctgcagttgcgtcggcatctcccacttggacaagtcttgaatcgtgttcttgctcgtgtccagcgttgccagcttatcgctgaacgtgaaggaggttaatgcagtgatgccgttgttctgcagcgacaaggtcgacacggtgtccgggatctccccactatcgaggctaacgatggagttcccgtccagaatcctatcaaagaccaacacgaattagtccagagctagcaccaaacgcagcctacgagtacgtacagcgtggttacactgctggggaacgatagcgcgtcgacactgctgagcccattcgacgacaagtccctgctcaaagtaccacacaacggttagcagctcgatcgaacagcaaaaaagccccacggtagcagcatacagtgtcttgacagtggcctcgctgtcctcatagatagtggtgacctcgttcccggagagctgcagcgtggtcacgtccgggaagctggcgatggcctgaatctccaagccgctggcgtcgacagacgtggttccgttgctggacgaggagctgatcttgacgacggagcagttggagtacacgacctcggcgttggacggcgtgttgtcgctccgtcgcagggtggcgagcgtcggcgctggtttcacgcacgcgttggtctggaacacgcgcgccacgctcggacccacgaggacggccgagatggcgcacagcgccgccagtgggcgctgctgcagacgtgtccgtctcattcggtacgtcctgcggcgcccgctctagcaaactaaagtgaaggccccgctcggcttttgatgcacgcgcgaccgaccggaaacacagtccgctccccatccgaaagcgctctcttgaggccggtccatgcgatttgcggattgttacatcggaccgctttctacggtggaaaccccaagaccagcgacaccaggcggagccatgcaacgcgcggggtttccagccgacgtcgcacctcgcaatgttcacaaagccccacgcaacactttgctcgaatcggtaggctcaagctcaagagcgagagcaccggccttggagtgtaggcaagcgctatgtgtacagctggacgaaagatgcctaccccggtcgtttaccaaggggacatccagtccatagtctaccgcatcgctcagccccattcgaccggatctctctctctaaatggtgacaagaaccacgagacaagcagttgaatggcaaactccttattaaataacttgcattctcaggtctcgagctcgagcatcaatccccgacagttcgtttacgacgacggacgaaagggtcgatggcccgagtggcccatgctgctggccttggactgcgtcctcgtcatgcgcctcgccgacgcgaccagctcctcctcttccagctccaggttgcgcagctcgtagtgaatctgtagagcggacggtcggtcctccgggtcgaaggccaggcacttgtccaccaggttgcgcacactgcgtggacaatctgtgtgcacctcgggtctcagagatccggcgctcaccagcacggcaatgcgggtgttggatgtcttgttgttgccgccgcggttgctctcgcccgggatgcccagcgagtacgggcggcgacaggtgtccagctccgtcaagatgacaccaaacgagtacacgtcggccttctccgagtagtgctcgcccttgagaacctcgggggcgatccaggacacagtaccgatctccgccgtcatggtctggtcttcgtccagctccctactgatgccaaagtccgtgagcttggcctcccacttctcgctcagcagcacgttcttgggcttcaagtcgcggtggatgatcggactctcgaacgagtgcaggtataccagcgcttcggccacgtccagcgcgatgagagacttgcacttcatgttgtcgccctcgcccactgagtggaaccaactgtagccgtcacgcgcgaactcgtcgcgggtctcacgttggagctgcttctgcagcatggtgctcaggtccccgcgcggcatgtactccatgaccatgctgatgtccagcatcgtactccaggtcacgccgatgaagcgcacgatcttggggtggtccagcgtcgagcagatgcgcacctcctccatgaagccggccaggtagcgcttgtcgcgcgcgcgctcgggcagaagctgcttggtcaccaccttctcgttctggaacgtggccatgtacacggcgccgtagccgcccttggccagcagcttgccgcgcacgacctcctcctgcagcagtcggcactgttgaatctcgtcgtctgtgcggatgtcgttcatgacgaagttggccgtcgaggcgctcattagtccttcgggcacggagtttgtacggccagtgcttgacatgcctgacaagtagccgggaatgtacttagtggccttggaggacgacgacgcgtccgggtcgaactcgagattctcggcctccttgagctcctcgtcccgagccttttggcggcggcggtagatgatgaagacggcgccgccgagcacgcaggccatcatcgctccgaggcagatcatggccagcatcatccagttactgaagccgctgctgctgctgcctcctcctgcgaacgtggggttaccgcctccgctttggtcactggaagagctcgacccgcccaccaggtacttggcgtcgaaatatccgtccgtgagcacgcacaggctcatcgagcgagccaccagttctacagcgtggctgtcgctgcagttggacccgatcgtggtgaccacgagatcgtccacagtctccagcactgcgacgctggagttggccacctcgaagtactcgatgttgctgcctgtgaggtccagagtcgagagcgacatgtccgtcgggaagaccacgccggcgatcatcttgatctcgcagtcctggcaccggaaagactgcagagtgtcgggcatctgccagctcgagagcttcggcatcgagttgtcgctcaggtcgatgtactgcgcctggtcgctcactgcgaaggtctgcagcgacgtgatgctgttgttgcggattgaaatggatgtcacggtgttggggatgtcgccgtccgatagtccggtcagatcgttgtcatccagattcctatgtccacaagccaaaacataagtcagacttctgcagtaaaacgatgtggcaggatgatcacgagcttacaggactgtgacgctgtcaggaagtgaaatgttgcccatgtctcggatgccgttgtcggataaatccctacgcaacaaatacaaataagtcagcatttcctatacactgcgaaagtccaaaacctatcaccccgtacagcgtcgagatggagttgccgtccgattcctcgaccacgacgatgctgttgcccgataaatccctgttcacacatccaagcatgcccactaaatcacccgaccaccagcctcgtttatcccagcgagacacttacagcgagttgacttgggggaagctctcgacgacctcgatcctctgtccggaggcgtccatggacttggtgccgtcgctctgcgtgtcggcgcggatggtcaagatggcgcagtccttgtagatgacgtaggccgcgctggacgacgacgcgctctgcgttaacgtgacctgcgtgggaggagacgcgagacattcctgccgctgcgtcttgagcgccgccaaactctcggcgctgctgccactgcccgacgagtccgacgaagattgagagagtgccgtcgccacctgtatcgccgctagaagcgcgagcatgcggccccgccatctgctcgcccctgtcattgtgaaggtctccgatccgcctctagagctccgatattcgatgaaacctgctcgtccccgccctgaacctgaaaaatgggcctcgtactgtagcggcgccgaagtttgtcctctcctctctcggtgcagcgagcgactcgagcggttgtgctgttggaggatcaaagactggagcggagctgtgcaaagcggcccagggtgtaggatagccgtgtccgccggaccagctggagccaatccagttcgatcaaaggcgcgtaacagacccgagtccccatccgagtcgccttcctcgaatgccgtctatgcgcgccgagacacagcagaaactgcacacaaaccaacccacctcctccgcttgttgaggattgttgagctgctcgtgctccggggatctccttctcaatctcaatctcccccaagctccactcgacactgactcctcctcttcatgctcctagggaaaaatggtcccgcagaggacatgcacgcatgcgcttccccctaaaaacactaaacttcgaagtacaatactcgctagacttgctgtgcgttggtatatagcaatacagtacggtagtgtcggtcgggcccaaagttttgctgctccgtcgatctctggttcgtgtgcccccattccacgcgtttcgctgcttcgtttgtcatggcacctgggggcatctgctgcacttcaagctgcgaaccaacactgcaaggtctggtgcggtgtttcatgttcacagaggcaattccatctgcggtaagctgaccatgacgtgatacactgtactgtattcgtgatcccaacggcggagtcgcggctggcggctggcgaattgcaacatcaattgccactggcaattgattcaagcgcgaaggaaatccatgctggaaacagcgtcaaagactcaaatgtatccgagtacacagtacatgtatactaagtagtgtggagtggagtggaagcttgtacaacagtgcgaaagctgctcgtccaacttcgcgttgcctgactttacatgtactggtaatcaagccgcggaccaaggcggccttagtccgtgtgaccgaccaggttgactcgacgtagaacacgatctcaaggcgttcataatccgcgctctacagcaactgagtcgagttcatgagtcatgcttgccttgtcgcagcttgtaagttgcaagctgtattgcatccaatggttagccacggttttgccatgcccatgctatctccacgttcattcacaaacagtccttcttgcttactttactgtaggcacgttgcactcctctctcttcagaaacattttcacgaaatacttctcagctttgactcttgctgtcagagaacgacgggatacccgacagcggcgtcagcgagtggcggcggaaggatgcacgtcttcgaaacggctgtcgctgctggagttccgacgcgccatcacggtcttctgcgtcctcgggctctggagctggtcgacggagcttctggagcggaggagggggttgctggttgttcttgaacgccgcagtcgacttgtacggagactgcgggtcgaagtgtccacctcgggggctccacacccgcgagcccagaggaagcgacttgtcgagactcgggacggggctttcgttgaggagctggttgctgcttgagctggacgagtccggagtatcggttcttcgtcggcgaggcgacccaagacgcgtatcagctgcgttggaaggcgaacaacttgacgtggtagtggacagtggtggagacagtgttccatacagggagctggcatcgccgctgctgttgcggttggcgtcgtacagaagtgtggaatcctcacgcgaacgacgaagcagctccgctgagccgtacaagtcgggggttgtgtacgacgtgaccgcgtctgcgtcgtcttcctcctcctcgtatcctacaaaatcgcagagatcgacagaactaacagactccgaagagagctactccacagcaaaggtaagggttaatagaggtagacaaccagcagcatttgcgtggacgtaccgaggttgtgacgcggcgatgacaagtgacgatcgtcgttgctgtggatgacacactttcgtccgaggtgcggagctcgttctgcttgacagggctgctgaccttcggcttaatagcctgacccagcacgagcgctgctgttttccgaagccccttgccatcgcggtgcttcatttcaacaggtttctcttcaaaactgttgaggcgagctcgagaagctcgaatggcggctgtgagtcgtggactcggtcgtatcgtccgctgctcgctgattccaagtgagagcgtgcgcaaaagtaccggggcttgaacagggaaatcgtccagatcgatgtctgctgtattcttcttgtcgcctttgataggggacagtggtggagtcggtgtggacgacccaggaggatgttccgcgactggtatcagatgctgcttcatccattcctcctgttgctgcttgagcagttgctcctcctcgaacttgtgctgcaagatcgtctgcaacgactcctgttgcttgagaatgtctctctgcgccacgggcgacgccggcgcttgaaactccagcaccttcggtacgacacggggcacggcggcgtttccagccgtcgctggggcagcggccgccatcttcttggacacctgaatacgaagatcatcacgtcgggaggtcggtcgagctcctgcgctgaaaggcggcggcggcactcctgcaatcaatcctgaacctggagtagggacactagtcggcggctgctggaagagattgtgccgctgtcgtcccgctaaagacgacggcgacacagacggagagctcgagtactccagtggcggcggtcgtgcaattttccgtgcagtttccgtgtccagcagcgatggctctgacccctgaacgaaccgagtccgggacctgtggaaggaattcgggtgtccgtgctgatccaggggcggcgacggggacctcatagctgccatcaacgtcgtagttgcgatagagttcctcttcctcctccacctcgtgccaggaacaggcgacgccgtatactccggcggggcggcaaccggctgcccgtcaccaaatgatccaggctcgacgaatccaagtcctgacgtctcgatcctcggcagtcgttgcttggctggctgagccttggacaccgacaccgccgatccccagggcgtcgacgctcgccgtctcgccatccttgcaatgctccgagcactcagaggttccgtctcctgattggtgacgacgttcttctccttatcctgtacttctccttcttcctcttgttgttgctccccatcttccggccctccctccgtcttgtccaccctctcaaaactcacctcgacctccgtgtggcccagtattaacctgtctccatggtgcaccaccactgcgtcatcgtgcactgggagcttcccattgagcgtggacccgccgctgctgtggtcgctgtagacccacacgccgcggccggaggtgcgctccagcgtgccgtgagctgcgtccacctccgggtcgtccggcagcttgaaagtggcgtccgacccgctgcccagcaagattccgtcgggcggaggctgcgtccagagccggtcgaggggctgctcgttgttgtcggacggccgaagcacgcgcagcctgatctgcgaaggagaaggagcgggcatgctgaagaaggtggggggggggagtgcggggctaatgcagagcgaggaggagaacggaggaggaggaggaggacggcggttgaagctaacggcctgaccgctcgagagcttcgacctttattgagcagtgtgccgtaaaagcggtactgcatcatacaaacaagggtgcgcctgctggatagccggcgccgggcaagcccacaccgacgtgcgcaccgacgcccacgccgccgttgcccacaccgacgccgacactcgcgaggccaggcacaccgacactgacggcggggcccacgccgccgggcgcgccgatgccgacgccggggacaccaagtaggcccaacgtctgagcgacctctgtctctgcgcgtgcgccgctgcagaccgcggccgcggcgaggcacagggcggagatcttgctgtagctgaggctgaacatggatggtagtatggttggttggcttcggtggttgtagggtagatttgagaatgagcaagtgaataagccagtagcagggcgcgcgggcgggcgcgcgggcggacatgtaagcaggatggcaggtaggcgtgcgggcgggcgggtgggcagcccgacagcctgacacaaacgtcaaactcatgtgaccacgctgaacggaccccttgctgtacgagcccgcgtgtgccgctatgattaccagagatgaatggctgcagctcgtggggtcaccacggccgtgaccggcaggcatacaggtgcagatacaggggcttgccgttaggcgagctgacaaacaagctgtcggtgtaagaatctcgtacgcagtgggcgtacgtacgagaggggcaggtttgcccccagcttgtgagaagatccaggggtgcaggtgtcgtccagcgccgttttgccatgtggcgttggtccttgaccggcgttgactccaagagcgaccctcgatgtctccatccggcacacctgtgaagggggttagtccctactctctacgtccgttactgtttccttattgagacgcaattggttgatcggtcgggtcatgcagtttgccgaggcgaggtgatactgtacggtagtgggcaccacgtggtgggggcgggttatttattgggctgcccaagctgtccttgtgcatctacgtgtgcagtacattcgaatagccgtgacagtgcacgtagtgctagtgcaaccgccaaactattgcggccattgcagctcacgccaccgcccattggttagcacaggtggctggatactttttgcgagggcacaagatatatgctgaagtttgtatgttcatatgatatgatggtagggtatattagattacttagcaaagcttgaatcctaataaccctgtagcccagataactcctaaagcataaagtttgtatgttcgatatcgtactgaagtttgtatgctcgttgttgaagttggaatcgatgtgcgacccttgataaccaagatcggcgcaacacggtcttagctcttgtgaacgacgcgcacaagcagcacagtaccataccgacaacaccgtttatcctgctaacaacggctaggtactcgctggtatacatacgtgcggcgcggcctctcaggacatccaaacacataattgatatacatcataaccaacacgccaacggacaaaaacaacaagtccagcagaggaaacatcgattgcattgaaaagattgtaacggggctttcacaatggactgacggcaacaaacgctaacgcatacttgcgaggtcggacgaaccagagcggtgatggatgactcgggcgggctggacacaccccacttgcttactccaccgagcgaagctggcggtacgccttctgagacgacgttccagccgtggctctagtcgacgcacttgcagacgcgtcacagcaattccacagttccaagtagcgcgtggatgtctggaaaaaagtcatcaataataagctccatgtacgttaaggaagagtgataggcgaacgcgcgtggggtctgattacgggtggtcggtcatctcgatgcacccttgagactgctgcgaagaagcccacatacctgtgcagttcccacgtcagcgagatatttcgattgcagcggtcttagacagcgatcagcattgacagcaattgcactcacgttgttgggtaacaggagagctccaattcggttccgagaagcgcgcacttcaacgtggatctcttgatgagtgccccgaaatcacgctttactgtatgacgcaatcccgaaaatagatccgaaaacaaagcgttataggcgcttttttgcaccagaaaaacgtgataccagaagaaaaatcgggcggcgctgcggccagcgtcaacccggcgataggatgcagcaccacgactagagaaatggtctccgaaggcccgccgacacgttctccaccgcacttgcgctcattacgcaattggacgccaagcacaagaatcacaactacagacagctacacgcacacgacacccagaactacagcatgctctcctcccagctcctgcaccgcgctgcccaacttcagagccaggtgccgctcggacgactggcggctcgatgggcgcccgctgtcggcgtcatccttgcgcgctcactgcaaacgtcagcgcggcgagccatcaccaagagctgcaacgtggaggacgtgcacgtggcggagacggagaacgaggcggccaacgagttcctgggcgtgcgcttcaacgccgccaagatccggaagtacagcgccgagctcgaggtgggcggccgcgtgatcgcgggcggcgacttctggacgcccatggacgccgccaaggcctacgacaagctcgtggcctcgcacggcgacgagaccatgccgcgcaacttctcctgagggtcgacacagcagcctttgaggtaccaggcctcaggccgggcgacgaagtagactagtgatagcaggacatatgaatttggtcttgagtaatacacccctccactgatttattgtatgccaaccgctttagcaacttgcagtggtgatggtttgtttgccggctcgggattcgaaaaggcaacgcgtttcttctgcttggcggtggaaccaaagccacgccggcttccggttacagatgggtgcagggcagccgggtgaacatcagtagataactgacagttgcgtggcgtcgttccgattctgcgattggccgtggtgggcacctgggaataacttggtgaggcatttgaagaaagcaggattcgagaagctcacacgctgaaacggccagaccaagaggaaagacaggattggcgacaaaaatcccttgaaaactgacgtgccgcgtcagacgtactgtgccgaccgtgacacacacatctttgcgctcgctgcggagctcgaaccgccgacaccttggagcgcgcgctcaccgcagcactccgacatgtgcacccttaatcgtcgtgggtacttaagtatgtggcttggtgaaagactccatcgcctccgacgtgttgaatcgtattgaagagactaggccacagtaccgtaggttgaagttctgatcttgaaaagacgcgcatcggtcgaaattagatgagttcgaaaatagcagcgtttgttttcatttctgtatgactctgatttccttgctaatttcgagctcaaagcattttaggttggttctaacacgccttctttattcacatcaaactttagacttgtatgagcctagaacccccagacgttgtagcggggcttgaggtgctcccacacacggcgcagcatccagccatcaccaggcgtgatggtcatcgagctgccggccctcatgatgcaaacagggaagttagagttgggcatgtcagcctcctcgtagaagtccggcaggccaaagccatggccgatctcgtgggcgacaatcgtaagctggtcgttgtcgagggcggcgagcatgttctcgaggttgacttcctggccccagtcgtcaccgaaaccaccgtccagaccctgcttcggccagagcgagatgtcccacacctggtcctggcacgaactggtgtccgcccaggcgcccgcggcgttgtcgtagaaccggtagcagctttgaggacactgcgggacgccgtccgagtcgaggtcgccggcgtaaatcttgccgagggagtcgtcgctccagtcgagctgcgacttgtccttgacagcgaagccgacgatcttgacgtcgatctggctgtacggccagcagtcgtagccgacgagccactggttccacgccttgtactggcggttgagtatggcctggaacttggacgcgacgctcttggtgagcttggtgtcgctgtcccagcgcacgcagtagttgagcgatcccttgttcttcatgaggtggtcgaagatccagttcttgttggacaggtcgttccagttccactcgctcggcttggcgttgggtccgatgcggtggtccaagtccagtccacgtcctgggtcgagatgtacgcattggggttgcccgtgacgcacttgttgctgccggaggtgatggtgccgaaggtggcgccaccggcggcgctcgtggcgttcgtctcgggcgtagctgaaacgacggaggacgctgtgagaccgacgatagcggcagccgtgagaagacgacgggtggacgacgaggagctggagttcgacttcatggtgtagctggaaggaggcgaattggaaagtggtaacttggtcggagtatgaacctggagtccttgtagctgggttctcgcatgggactttatgttggtaccatggcgacctgtgccgggcgcggtgactgtcagtgttcatggtcatgagttctcgacgtctcgtagcatcgtctacgtagcaaaacctttgaggacgcatttgaagaccaaatgcttattcgctgttcgtcttgcaaacccagctgcaacgctagaagatttcgcaactctatcttccagcacattgtggttcacttgacgcttataagtacacttagacgtttagccatgtatttttcgttcatctcaagcgtgtgaagactaaaaaaacgacctcgtggatcacggaggatcgttaaaggggatcaaaatgatcagttcattgtcggattgtgagatagattgacctgcaacaacatacaccacgtatgtacttgacgtcagcttttgatcgcactgatggatcgttagaggtgatcaaaatgatcagttcactgtcggattgtgaggtgtattgaccatgaccaacatacttggaagcttttgatcgcgctgatgggtcggcattcgtcgtcacccagatgcttttaacgcaaaatttgcgcatttaatgtgtcaatgatgataatctggtgctcgtgtcgcaaacgagcttgcagctgacggttgctcaccggtcaggctcatgactatcaactgctttctgttcatttatcactttccaattcgcctccttccagctacaccatgaagtcgaactccagctcctcgtcgtccacccgtcgtcttcttacggctgccgctatcgtcggtctcacagcgtcctccgtcgtttcagctacgcccgagacgaacgccacgagcgccgccggtggcgccaccttcggcaccatcacctccggcagcaacaagtgcgtcacgggcaaccccaatgcgtacatctcgacccaggacgtggactggacttggaccaccgcatcggacccaacgccaagccgagcgagtggaactggaacgacctgtccaacaagaactggatcttcgaccacctcatgaagaacaagggatcgctcaactactgcgtgcgctgggacagcgacaccaagctcaccaagagcgtcgcgtccaagttccaggccatactcaaccgccagtacaaggcgtggaaccagtggctcgtcggctacgactgctggccgtacagccagatcgacgtcaagatcgtcggcttcgctgtcaaggacaagtcgcagctcgactggagcgacgactccctcggcaagatttacgccggcgacctcgactcggacggcgtcccgcagtgtcctcaaagctgctaccggttctacgacaacgccgcgggcgcctgggcggacaccagttcgtgccaggaccaggtgtgggacatctcgctctggccgaagcagggtctggacggtggtttcggtgacgactggggccaggaagtcaacctcgagaacatgctcgccgccctcgacaacgaccagcttacgattgtcgcccacgagatcggccatggctttggcctgccggacttctacgaggaggctgacatgcccaactctaacttccctgtttgcatcatgagggccggcagctcgatgaccatcacgcctggtgatggctggatgctgcgccgtgtgtgggagcacctcaagccccgctacaacgtctgggggttctaggctcatacaagtctaaagtttgatgtgaataaagaaggcgtgttagaaccaacctaaaatgctttgagctcgaaattagcaaggaaatcagagtcatacagaaatgaaaacaaacgctgctattttcgaactcatctaatttcgaccgatgcgcgtcttttcaagatcagaacttcaacctaccggtagtgtaccgtaaatcgcggcgatcatgtaacgtcgtaaaaagttaactttggttgtgtaaaaactctcgtaaaaagttttccgctgccaacatgggggtatttcttactgagcgaggggccattcattccaccatctccccgatgacggggaccaggaagtttagcacaaagaacgccgacaaactgcgtgccctagagcgcatcgactccggtgaatcgatcgaggccgtcgtgaagtcttacggtgtcacacgagtaaaaatatggcgttgggggcagcagctggcggcgctgcagaccgttaaacctctttataggcattaaggttcaggtagcggcaatctccgcagagaacgaacaacggtacggctacgaagattgtgcaatgagtgctcctaataggtttctaacgtttgctgctcttagtttactcaggtggattaggcatatgcgaggggctaaacacttctgcatcactacagagtgtatccgctacgctctcgcatactttgacccccaatatgtcgaatcaagaagccgcgacgcggttaaaatgtacatatttcgtttcttacgccgcaaccgacttacttaccgacggatcacgcaccgaggccacgttacacgccctgaaatgcaggtaaaacatattttagagatgttttattgctgttttactaactcttcattagattgttgctgatcgtttctcgcagtcaatgctgcatcacgttgaaagcgctgcgttctttcctatcgggatgccagatagatacgactacgtcttcaacatggaccagacctcggtgtgcgtggatatgaacccacacagtatgattgagtttgccggagctcgaacggtggatgttactcaatgtgagtctatcaatgcgattaatgggattaattttattctatagactaaatctctgttacagcgacggcgcctgactccttccgagcctcggtgttcctgtgtgcctctgcgacaggtcataagctgtgaccgatgatcgtgttcgcagggacaccaggtgcgatagtcctggagaagttgaaggaggacaagcagtacgactgggacagatgctactatacggtccaggccaaggcatattgcgacaagaaggtcatgaaagaatggatcgacaaagtgtgggcccccgatattcgaggaccaagcgtcttggcgcttgatagcctcaagacacacaagatggagtctatccggactcggctcgtggaccacgcgcacaccagcgtggtctacgtgcctcccggggtgacgggactagcccagcccatggacatcgccgttatgaagcccttcaagggtaggctaagagatctctacactaagtttgttattgaaaacggtacctttacggatgcagcccagaagcgacggcatattgccgcttcagtgctgcaggcgtgggacgaggtcgacacatagtctatctgtaacggctttctaaaagacagtctcattgcgacgggcccgcgcgatgagagagggttcttcgcgacaccaacgcctgctagtgaaggagtagttgacaaaacataagaacaatcaatgcagtcggaggttggttgtaagaaggggtgtcactttaggattttttgtcgtcgtaacaaaaaagacaggccggcatactttttaccatgcaaagcaatattaccgtatgttacatgaccgccgtgatttacggtagcttcggttcgtctaccgaagctgcttggtgtgcagtctcttcaatgcaattcaagcacatcgaaggcgatagagtagctttcaccaagccacatacttaagtacccacgactttcatagctacatgtgtcggagtggtgcggtgagcgatcgctccaaggtgtcggcggttcgagctccgcagcgagcgcaaagataagcatgtcacggtcagtacgtctgacgggcacatcagttttcagcagcgagccggggatttttgtcggcggtgctggctttcctcttcaccgctttgctgtattggtttggcgctttcggcacgcgcatgcaaggcaggcaaaaagaagggaatagcttaccgatatagtatatagagccgtcgtcacaagcattctcgtatttgcgtaagttacataggcaacccggagcgttgctccgggagggtacccaggtcggcgaatagtttcatggacgatgataacggataacaattgagtaaatcccaaagttgtgttgtttttaatcattttaaggattttaaaagagcactaccagccaaactctatagttgattctaacgtgggcatctactgcgcctgcttcgcagccgctgtatctgcccaggaataacaccctcgtcagcgtccaatggctgcgttgacgccagcaacgagagagctatttcattcagtttgcaggtaaggtatactgtgctcatttagtactatgttgtgtgctaacgatcagacgagagagctagcggaacgaaggagagatgcatggtgcgctgatcttgaccttttaacttgagggtaaattgcggaatgagaaatacgttaatgtgccaagtccttggaagtgggcgcttcaacgcaggtaaagaaagcctaattcaaacgaacgatgctcgtgtcactgtcgagttgagctggttggtttggcgagagacacgaggttgggcatcttcggctaagtgattgagtattgagcaaattgacatgtaaaaaatgcagcctgcagctagacaagtcatattggtcatcttcagctaagcttggtcgattatggcgcaaattgatacgccttcagcgaggccatgacgctctcatagtgtactggagcgtccgtaagtgtttgaacgcaggttttggtaaagaatgaacgattagtatcaacctttggtaaataatgtgcataaatcttagcatttatcgacgggtacccgattccggcagatattagcttaaacattacaattaagaaagagagacccggtttggtacccggttttggaaagttacaagttttttgccggggccaagcacaggtcttcgacctgtgaatatgggattttccgccaaaacgtaggcggattggcttatgatttccggaattggtgtatttccaccccttggagtacgacacattgactgaggtccactattgggcagttaggatcgcatccttccgggaaagcgtaagcggcggtagccaacgataagcggagactcctattggtcaaaataaatctacctaagtatgcgaatagagttcaacgcaatgagatgctttgacggcctccaggctccattgtggttaagcaactactttccgaacacaggcccacgccatcctgtatttcatgttcattattgtctccgtctctcggtagtctccgcagagtgttcctgctgttgggtcgcgtcgtcgtgccatttgttcagcggtacgtcacagcgtagcctcagacgggtgaacgtcaccgctcatgtccttgtcggccgccgcgctcgcctccgtggacgtcaccgtcttctccgtctcggccgagtcgacgtcggcagacatcgtcttggagcgggtggcactcatggccgaaccaatgacagtagcaacagtcgctatctgcacgccgaaggaatgagtggagggggtccactactcggtggagtatcatcggcaggagtagccatacataggatcgaaggctcacgggtaccatcgcgaaaggtgagcgcgctgtgcgatagtggccaagtagtaggcgctcatgggtcatgatgaccgccgcagtttgttcgaactttgaacttatcacacttcgtgtttaactcaagtcataacgcgatccttttcccgatgcgccatgctccgtcgtcgtagtacggcttcagcttttcatgttgttttcggttgtcacggcccaaacacctacatttatctggaatgcgtacgctaataaatttgccgcttggatatacattgcacttgaggtctttccgaacgacttaagtgacctcaagtgtacttgtactgtcagctagtgaatccgtccctctttcggtccagcgctaatcaggtcattttagccaatcggagcgctccattaaagcgtcggcggccgagacttacgttttctcaagtcaattcaatcttgtgacagctattattataaatgacaagcgatggaatcgaaatgggtatcgttgaattatgataaaacaaagaactagggctccgcgaaggctgggataggagaattttggtataaaccccttctttaattttttaatatatgtgtcttattagctacggtcatctcctgcgcctgcttcacagccgcagcatctgtccggaaatctgccagttcaaactgtctaccggcaatgccttacgaaattaaaaatgcgaaccttggtcgagatctgtttcgagcttgtagaaaatacaaacgcttaccgttcgtatttacttcatttcgttcatacgtacccagctcaatacatacaatgattcataccagtgtaggaagcttccgggtctcggtcgtcccttactacaggtagccaggtctcgtccagcccgaccacccgtagtgttccgcgtccaccacagataaccaggtcccgtctagcccggtcgcccatagtgttgcacgcgtccaccactcgtacaaacaccattatcgttgtcgtgtccacgcctaggtgggccagtatagcgccgactgccagcaggtgcgaggcagtacaatgatcgaccagacaggtactggccccttcaccaggcgtgtcggggatagggacggctgggaggggcaatacaatcaacctgggctccggcaagccacaggcgacccccaccggacatgtaaacaggtcgaacagcatcttcgtcacggcactcgggcacgcccaagcactcgaaaccgctgtccttcacggccaaagtgctgtcaggagtgcacctcgtcccccacggcttctccgccaccctactcaatacattgccctcatctgtgcaccgcccgccactatcgcttaccttatgccacttactcctgtgtctagccggcacttccctggtcgcaagacacttccctggtactaggtcacaggaacccgcgtttcggcgcaactgagtgtattacaagtcttgactcgttactatccagcaacaaatcgcaacggagggtcgagctgcccccacttacttctaacccccgccgatctaccctatcctatccactcggcgccttctagcctacttggacctctccctctcgggccctcatctccttcctcgtggcctctcctctctgcatactcgttctctgtcctgttcacaggtcacctcgccttgcgatcttctgcacccgtcaacttcaactgctacctcctgtcgcacgtaacggtagcccactggctcgcttccgtcaccactagccgccgtccccacagtcttcgtcaccaactgctgctaggcgtgccacaccagctactccgtcaagtcgatcacgacctggacgctgttccgcagatcctgctcgtgtttctcagaggcgggacgagtcaccacactacaccagtgttgtcggtagcgcgccggttcgatctgcccacgcatataaactttttggagggttctgtacggcaccggagtcgtaccgatttcaagaaaatgcaccagttagatgttaagaggggtcattgtttgacttgacgtaccacggatataatccgatttggtctgcgatagcagcactaacgttgcatcctatccccgtattaagattgagttagattataaaacaacgagttagagcttcatttagacaaaaatgaagtaaagcacaataaaataagctttaaaaaattatcttggtcgccatactaaggacgattgtgatatgaaacctagaaaaatctgcggtacgctagttagaggctatttcttatttttttcaaacttcgagaacgttgttgctggagttcgtattgattgcgcgagcgttccaatacaggcgtccccgggctagtcccggctgtatattttaatgtacctcgcacaggaagtacaagcagttctcaagatttgcgcgcaacttctgcaaacatattgacttagatgagtgtacagcgagacctactgcgacaagtggcacgttgcgggataccaagcttgtagtaagtcagtattgtgaattccggccaaattttccaaatcgcggcggtttggagaccccgctccaatcgccaaatacaaaactcaagtcatttgctcaatctccgggcccaaaccatatggtccaagtgcccgcatgtcaagaccaattcgtacttaaacgggtgcctataaccaatcctagtggccacggagattggccggagatttggcttgggcggttcaacaaacctcccgcggaaattttgaacagaacacacaatacagagagtagcggcaataagaaagggtcaacaacttataattctgacaacaaacaaatatagaataacacagggcctctatttaggtactgagtttgtcaaagtgatgtggcacacacacagcagtcaaggttcccgcgcatttacaaactccaaggacggagccacagtggctccgtgtacacgcagtggctcaaccactgcgtgtgcatcaacgaccgttgtgcttcagcgccccagtgctcccgtcacacttactttctcgcccacattgccccgcaaactgccgctaaggaagaccatgagcgcctgcaggttgatgcggaggtgttggttgtcctacgtgcacatgttgggtttgcacaagctcagcaagcacaccgccgagacgtagctacagtaatgtgcggtggccacggacaagcagggcgtcgtagtgagtcgcagccagtgtatttgaaggtcgtgcgcctcaggaagacgagtacgacgagcctgtactacaggccctgtagcgtcgaagtccatcgtcaatcgggcaaagtaataacgtacctaacgtgtttcatttatttcgttaagtcaatacgtttaaagctccgcaagatttgatttgacttgattattgtatgtaccttcagtactttaatcgttgaaccctttcttattgccgctactctctgtacacactcatctatgttcagaccgcgtgaatcttgttgattcgcaaacatcataagtaccactgtggcgaataggccggggacgcctgtacctaaatagaggccctgtataattcaatatttatgtgttgtcagaattataagttgttgaccctttcttattgccgctactctctgtaatcaagttcccgccagactggaatatctgctccgaaatctatccgccttttatccagattttcccagcaaatatagtccacaaaaacaggggtacttatcctgggaggacagctagaagagctgtatggacagcctcacacagattaattcgtcgaaaaaaagttgcttgtacctcaggcaacatttaaacaacatttcgccacaccatactcacacaatcgtacaccatacttacacaaatatagccatattgacatcccgaccgtagggacacaaagctaattgacaatgaaatgaggacagcgctagcgacaagagaatgcaggatgaccaatcagcctacaactacactgtattccatatatgcagttcctagttactgacggataactgaggacgtcttacgtccacgcagctaagctcttggcctacaaattaaacctgtccgcctggatctcgggcagtctcgctggcattaaatcatcggctctacataaaaaatggtggtcggcgctgtaaacgcttacgtccttagttcttggcctacaaactataaaatctgtccggtaggcagcttcgccggcagtagatagttggctccatataaaaaaggaaaattccggaatatgaattcaaagtgaatatgaactcaaaatgaaattttgtgcaaaaggtgatacaaggctttgtgccaagtgcatttggccaccgatagcggccagcacctgactgccatgcacgtcgctgaatgcacctattgtgtcagtatagcactgggtaaacgcgaaggcggtgccggtgtaggcatcgccctctgcctaatagttgttctggtggagtatggtcgccttctgcgtcgcttaagcgacactgcccacgctgtataaagcatgattggatgccttactccccatgccgccgctggaggcaacaatgtcgtggccaatgccctagcagaacctgaaatatgtgctctcgacacaaatccttctatcaccttttgcacaaattttaatattgagtcaccttcctgaaatttccctaagaaaaatgatggtaggcgctgcaaatgaggggcttcgcccctcatttgctactttgaacatagtacgtaaccactgtttggtactgctagcgcatgtattaatggttgttgttttggatttggcttagctttgtagtggcaccaaaacactcgaccactcagtaggcgaagtattagcacaacacttgactacttcgtagccaaagaagatagatatctattagtttcttcaaagtgttccagtatggaagatatagttgtactcgagttggtaaaatcgagctaacgttagatacaaccgagcagactttttggaatttaaagtagtcctcccagcctaacgcaactatcctgcaggctatcctgcaggctaccctgtgaacggcgctccgttggccagcgtctacaatgctcccgcgacggctgtcaacagcgcgcctgccggcactggtaccacctacagtaacgccgcgcctggacgtggaaacgccaatgccaatgcgaacgacggcaacaaccccagcggcgactcgagcaagaccgtcaccgtcttgaacggagacggcacgtccaacacggcatctgtgacgagcagcaacggtgccgcgatgacgggcggcgcatcggcgagcgctacggcgagtgcgtctgcaagtgcgtcggctagagccacggctggaacgtcgtctcagaaggcgtaccgtcagcttcgttcggtggagtaagcaagtgtgtgtttagcccgcccgagtcatccatcaccgctctggttcgtccggtctcaaaatacgtgttagctttgttgctgtgtcagttcatagtgaaagtcatgcttcaatcttatcaatgcaatcgatgtttcctctgatgaactcgttgtttgtgtcagttggtggtgtgggttatcaatgctttgttgaggtcgcgtgtacatgtatgtatacccgcgagtacctagccgatgttagcaggagaaactgtctgtcagtgtgatgctgtgctgcttgtttggtttggcgtcggtcacaaaagctacgaccgtgtgttgtgccgatcttggatatcaaaggtcgcacatctttccaacttcaaccacgagcatacaaacctcagtacaatatggaacatacaaatttaagcataaagcttcagtacaagatcgaacatccaaacttcagcatacaacttgtaccgaagcccagaataaccgacatcccatcatcgggtaggttagcactcgtttttgttattgaattgagcattgttgtcacttagctatacgactactaaagaccagccccgcagatgccaaacgaaggttagcactcgttgccaaggcagtagcatgggctacatgcgatagtagcagcagccgcaataatataccaatatgcacaagccgtagatttttttaatattaaaatggggtcgtatactgatcgggtcgggggatttgatcggtcttgcctatacacgattgtagtgttaacactttcgagagaggcctcagaaagaccgtttgcaaccgcagcgaagtggaggtctgcaatggtcggcgcgtgggccggagtaggtatgtctaagtaggagtcatcatctttttaccaacgccttgcccgctatgagcgaagcgaaattggcggtgcaaacggggagctcacccaggcgaagcccgaccaaatccaccgacccgatcagtatacgatcacataaaaagtcaatcgccagtcgttttgcgtttagaagagcggctcttgctactgacaccgaaaaaaacacccaacgaaaaaaacactggggcccttcccggtcttgcacagccggccggggatggatctcacggccctcaaatcgtgaaaacctcaaagtgctccagggaaatgaatgccttgaatcccccacgaaatcgatgaatctggggttggtctcaatggaaagagggaggaatagcctagcctaggcctgggcctaaagcgcactgctccaggccacgctctcgcttcacaggcaccgaaattgcagttttggggaatctggtttcaccttccctctaccgtctctaccccggcctcggttatacgaaatcatgccagcacacacatagagacaccgaaaaacacacagctttccggtgtcagcagaacttttctaagaagagcactggaaaatcgacaagtttgttctaatatctttccaggtttgggtaagaccttttcccattggagagttgccaaagccagccgtacgactggatacagcaagactgtatccagtcgtacgggatccacgagcccatagcacggcgctgagggtgtactgaagtctagggattccagtggaagtgcgtcgacaattgccacgaggttttaggtcgtcttttccgtggaggattcgacacaaacgagctcttttgtgcgacaggggccaacaagagcaacgacaggtttttaagcgggttgggacactgacgaagataactttaagcttgcgctgtgaagtgtcatattagtactgtagtcgtctgaataagaaaccgactgtcaaactttggagtgccaataccaccaagttcagagattaaaaattaaataaattcgctaaactcgggtctgggcagtcagcatgcacaggctgggagggacgtattgggagctaaggttgcattgtattaccacgcaaccattagcttgtaaatcttcggtttacgactctacttctacgcttcgaatagagaacagcagagcgcgaatcgcatgcgatttcggcgagaccttctcagttctgatacaggtgaaaggcgtatccgttgtagatacggtcgtacttccccttctgcttggggtccgcgattgccaaccagtccttgatcttctgcagggtgtacccgttcgtatcccacttctcgtacgctttctgctcctttgaagggtccttcagaatcgccttggccaactttttggcccccgccttgttccacagctcagtcacgctgaaggtccgctcccccgcatcgtcctcttcatgagctcgaagaaatcttccaccggcaatgtcgccgttcctgagcgagcgacggacgagatctggagattccaccatggagatattggtttcgtcggagtactcagttgcgttgcaggtcacgacgtagccaatggccacgacaagagaaagcacaaaagatagacacatggttcgtgatacttggcgacttgaggacttgctggctggagagcgaaaggagaaatgtcgttattgggtggcggcggacacaagtgctctccgttgtggtggttcctcttgagcatgcacgccgccacttttgttccagtgcaacagaaggacaagggatcatttccttggatgtgcatgctgtggattgtattattgttttttttttcgaaggcaacctcctcggtgtttgattctgatcgacaagaatcagtgatggcgtgaaacagacgaaatgagcatttcatttcgataatgtatctcatttaatgagatacattatcgcgtagccgaaggtatggctgcgctagactcatcaagaacaacagatcatcaaaatacgaatgtatatgannnnnnnnnnnnnnnnnnnnnnnnnnnnnnnnnnnnnnnnnnnnnnnnnnnnnnnnnnnnnnnnnnnnnnnnnnnnnnnnnnnnnnnnnnnnnnnnnnnngctttactctgcataaggtttggtaccttgcataatttgtgcaaatcacgacagagttatcttaagcataagcataagccgtctatgtactgaattaaagaacactttgaggtaatatgtcgaaaataaagtatgccagatttgcactcggcgatataattgaggtaacttattaatagttctttgagtatcgtgttggattcttgtacctctcactctcttttggtcccacctttgtggctaaggcggggagttctgtaagataatgtgtgaatgcactgccagctggctgacgctgtgcgacaccggactacgtagcagcgcttatatttagaggctccaacactagggctccgcgaaggctgggataggtggattttggtataacccccctctttattttattgattacttttcttattaactacggtcatctcctagccgcagcatctgcccgtaaattgaccttgagaccgtagatgccagatatcaactggcaacgcttacaccaaaattaaaaatgggaagcttggctgagatctgtttgcagcttgtagaagtttcctactgaaaatgcaaatgcttatctctagtgctattacagtacgcctcgatcgttctctttacttcaattcgttcactgctcgaatatatttactggttcgtaccagtgtcgtcggtagcacaccggttggatctgcccacgcatataaacgggccagtgcatcaccggttccataccggtgttatacgtatcgtaccggttcagtctgcccacgcgtataatttatatgcgcgatataaacgacccattgcggcatcggagtcgtaccggtttcaagaaaatataccagttagatgtcaagaggggtcatcgtttgacttgacttaccacggataccggtataatcctatttggtctgcgattgcagcactaacgttgcttcctatcccagtataaagaacattgtaaatgcaagctgttgcgttcgattcttcgtatgttagctatagttgtttgtgtgccttcaatactttcgtttctcaatcaaaggtgtcttccccagtgcaagggatcaaagaaagatgagtacagtactacacagccgactctcttgcgtcagaatttatgcccgagtgacggctgtcaacagaggagggtgcgtaactatacagatttgtggtgcaaaacatacaaacttggggagcaaacatattggtgggggctgactatacaaacgcaggcataacataacggcgagggtcgaactataagcggccgaacggcagagttgcccaggtctcttatcgtagtggcagaattaccccgaagccttagatgcccggcagaattgctcttacacttagctgagcgccttaacttgtacatacataatcgattccagcgtctagaagtcactcacgtctacgactcgtcatatcgcttcgtgtaccaacatgactacatggacccagctcgctttgctcgacagtggtgatgaatacgagttttatcgggactagtacatttgctgcacggcaaccttcacgaaagtcgacttcgagttttgccgcatctgtggtggcaaacatacaatggtagagcggcgcctaaagtgttccagcaaaacgtgcagtgggtttggcgtctgtagtgcgatttggaaggttgatgagtgcaccgaccaggatacgtggcgaatattggtgaactcgaatggtcactcacgaggcgtccttccatgtaatgagaagccccccccctttggtgacccgccctatgaagacatttattgctgcacaggacgaggctggtctgcctccgagggttaaatactgatctatgcaagtgcatcactaagggcatggcgcccacccatgccacgagattcggggcgcgtgaaacatcatttataatactttgttgtacaactacggtgctaggataagggataagttcatttgacttctgtattgaagacgcctagtatgtatgacgactgggtattaattcctaagcaagaatcctaagaattgacaagatatataatagaaggatacgaagggggccagtatataaacgtaagagtgtaatacacagagaaaaatatcttaaagcgcgtcattctctgaataacttattataggtaccgtacttcaaaacaataaattcttaacaacaggcctgcagtttgtagcgcccgtcggatgactttgaattaaaagtgtacgttataaacaatcagaatgcagtattgagtaaaatcttaaaacaaaaactgcaggtttatttaaaaaaatcggggcgttatgatgttaatatgagtgcagtttcaaaatctgaaactgcatttatttttacggaaaacatatttgtgttggtacccgctgcaatgtgtaattcagctgcatggcagaattattcgtgccgagcgaattctgccccgtggcagaattacaatccgcttcaccatccgacagctggtgcttgtactgattttgtgtgtgtatattttggaaccactacaccgttcaccctaattagtcgtgccatgactatttaccgtgtacgacctgaagagtggctcaccctgttttgaaattccgttttcgggaaaactattcctatctacgataaactaaatgcatcacgcaattcgtgttgccgagatctactcgaatccggtctcttttctggatttaaggtgaaaatgaaaatacttatcagaaccggtggaatgattatcaaaggtgcacgactaattaggtcgcacgactaattagggtgaacggtgtagcatgtatgttttgcccggaaatctgtttggtggcgaccttttgtcctgtcaacactgtaggattggctttcaacattgaaaaatcgggctttagcactgaagggttaggtaggtctacaacaacactgaaagaacggacttctccactgaagggcactgagccatttataaccgtaccaaggcaaaaacgtgctaagtttgagcagcccacgatctattcacggctctattttgctcttgtccgatggccacagtgcgtattctagacttcgttcgcaattgcctaccttccgtgccgtgcagcgcgcttcatctacagtagtgtccatggcgacatttgtccttgatacctccaacccgagcggtcagtcggattcgagtgtagcacttcagacgtctagctgccaaactactcacagttctgcgtgctgttcccgatggacaggacttcgcaaccttcgcggcatggagcggcctccatccacgatgacaacgcgacgcatgaggtactactagcaacactgcgtccagcacacaagctaaacagtctgcacagaatcagagcgaagcgagagcgtcaacgaccaatcgttgaaccagcacgaaggggactgcgatgagctgtctgagggtctgtaacgcgattcctaggcgatgaaaaactccaacacgacaactacgtcaacgcctatggcctgctgcggacagctacccaattcagcgtagtcaacaggcagcattagcgcctgccagagctggtgacgagcagtacgtacagccctccagcgaagatgttggcctcaacgatccgattcaacgacggaccaccgcaggtcaccatagctccagcgactatgacgacgaagacgacagtgtaggcgaatggcacgagcaattgccacgacgtcgtcctgctcaagcaattatcttcatttctaccccgcaccgcacatgcccctattttgaattcaacagtcgccgcgcagctggtcacactgctgctgaaactgatacgtaggccaaccgtggctaaaatgacgccaaggcaagctctacctcatggctgcaaccagaagctgctacttcgacatcgacacgagctgcactagcatctactattcgacttcaaaacgcgctggccgagatgctactacttgaacatcgacacgatctgctcaaccagctgcatgtactacttcgaagacactgggcagcaacaactgcgccttcaacatgccacacctgggcgatctacttgtcgcgagtcttgcgcgcatacgatactaggcatcatgacagcactgaattatttctattaccacataattagtgctaatacactgcgcgacataatttttcggacactcacatttctgtccatatctcagcttctagaaatagttacagctcgctatttagatatgttgtacctatcagatcaatctatagctggcatgtgacgcggagctagatttttgagcgtgtagataactttcggacaattttttatcttaattaaagtatggataagaatgattgtcgtaggttgtcgtctgttcgtctcctattatatggtgtggaccaccagcgacgatgatgacggcaaggctgcctgcggggccggcaagcgcctccagagcgcgctgtagctccaggcttgatgccaagttgttggcaagctctacatgctacgtatgcacatcatgccgctgcccttggcgaagtctgggcctccacggatggcgctgtaggctcgacaccacccgctcccatgatttgtatgggaatgtgcgacagacaaattggctgtcaaggcaatgaacatgtaggcatctagtaggccaaagtgtcgccaaagcggccactagacaacttctctagtctatctagcctcatctaaggaaattaggctctactttgatacttgtagccgtaaactagacgcgaatgcgtacatcggcgccgacaaaagatgctgattggctgatttgatgtagccatcactaaagtgcatactttaattaagataaaaattgtccgcaagttttgtcgcggcccgaaatcgtatcagtagcctatctgcacgctcaaaaatctactccgcgtcacatgccagctatagattgatctgataggtacaacatatctaaatagcgagatgtaactctttctagaagctgagatttggacagaactgattcttgaacggattttacacgacattaccaggacacacaaaattgtagtattttgtccaatcagaattacattaacaaaggatcgcagttttgcctgtgtttgacctcaccgcaacagcaagcatgccgtaggctaccccacctgcacagtagtataactttacctcttcatcatcaagaaaagctggtcgagactgggccggcgtaggcagttgtaatttattgccgagtcggcgttgaagcacgctggacgtcgacaatacggccagctcttcgacaaggacatcatcagcgagatggcgctctacaagtctaatcagggcttcgagtacaggtgattcggtctcgggtggcatgctggcctggacctcgacggacaggagatgacgtgcgcagaccagcaaccatcaaggctgagggctcggtacggtagcgtcgtggatgacttccttgaggacgatcacgaccacgacaactagctggtacggcagctctggtatgggcgtttggcggaggctcaaacgtgggcggcttcagcgggtcaggccctaagggaaggtgctgcaattgctcttcgctatccagggacactacaagtacaacagccatgacaagcgtcgacaccgaggccgccagcgtgcttccccgcaattaaatgttgcgattagcactgggggtaatgtagagctattgtttgtacatccttcagcttgtatacgtacggcgtcactgctgacttagttaaaaaaagtgttgagaatgtatgaaatgtatggctgagctcatatttctttaactggtaccactaaaaagctctttggtctacagagcgagccatgaatactgtatcttcctgctgggcacgctacgctaacggacacaacgtgtgtgttatattctgcttggcgcattagctcggaagtttgctgcattgcggatgcggcatccgcaatgcagcaaatcttgcaggacatgttgtcctgtaaaagcaccaaaaagatggactttgtcaagcctgtgccaataatactagattttgtatatgatttgacgcggggatatttcgatttggaaaatacaggacattccgtcctgcgcttatgctcgtgagcaaggtggatgtcctgcaaaatctggagaatgtgagtgtccgaaaaatgatgtcgcgcagtgtacctcaatgtactagttctttttatttagctttcgacgcgacctgtgacaaagcgttggaatgatgaggttagtgacgacttggcaccaacgacagcgaaggccgagccacttgacttgctgtgttaccacaacacggtcaacttaccgtgctacggtaactcgaccgtgttatggtagcacggtaagtcgactgtgtcatggcaacacggccaggtgcgcgtcgtcatacctcaagccgcacctcaaatcgtaccgtagctcgttgcttcgtcattcgtgtgttggcgttgagtaccagtcttactgcgtacagccagcagctaggctattgttctctgagtgcattcagcgcagcgtgatctaagaaacagggatgggaagtttgaaataaagatgtagatagatgtggattttgtaatttaatttatttaacttttgatccacaactcaaaagcgaattatggagaagtagctgcttgacggtcgtcaactgtaacggggttacacgagagttacccgaagggttacgaagtggatatacactgtctaacctaaatcagtaggagaatcagtacatggcttcagagccactgattatgcatatgactagggttcactatgctagatagtgaaccggatacatttacacagtaggcggctttgccgcaataaagggaaatacattcagtttgagattcacacagttaagagttaagggttgactcttggagtccgtagggtgtacggactcgtacgttctggtattagaacgggcaatcttaagctgagactctgcgagtctgttaagcttcctctgacgcaaagctacggcagccctgctgcacttggtagcacttgtagtcaatctgacacctgaatctgtatagactgaccctctgtggagaatggagcagttcgctcacttgcccccgaaccagcaggatgcgcttaaaaagcttatgtccttgctgggcccggagggcgtgacgcaacttgcgcagcaaggccccgacgcggtgaacgcgcgtctcgaggcgttttcaagctacgagaatactctgctacagcacctccagcagaggatggcgacggccgcggcgccccaagcgcccgcttcgtcattcgacgcgggaacaagacccaagccgctcatgttgagcgtgaagaccttcgaaggcaaggagggtgaaagcttgatgctttagatccgtgaggttgagatggctatgagctcagctctactccggacggagtcgtagcgcgtgacactagctatctcgaaactcggtgggcgagcgagagagtgggcactaacgtccgggacatcggtcgaggtggccttcccgacgtgggaccagctgaaacagcaattgtcccgagtgtttgctccgcctaacgaggcctatcgcgtgcgctcacgcttcctggcgaccaggcagaacaagaaggagttgatggactacgtccaagagatgagaactctcattgctggcatgtctgcggaccccctgccggaagcagtcaccgttacggtgttcatggaaggcctccgcactggcgttgccaggacggaggtgttccgaacccacccgagctcttttgaagaggctgtgagcgtcgcattgaatgcggaacacaactttaagtcgtcgagacttgggtggaatgcgtcttacgctagcgggtcgagtggtccggaacccgtgaacctcagctatgctaaagacgaagaagccgagcttcgtgctgctgagcagcgtcgcggtatccgcagatgcttcatctgtggtgacacccgtcaccttcgtgctgggtgtccgctgcgccatcagcgccaggcttcgtcaagctgctcctcgagatcgagccagggctctggtttgtctcggggaaacgagaagtcccagtaggcgcggggcggcctactggggaagaactaagttctattgagcctcggcgaggtggaggtcgacaggacttagccccgaagagagccgtactctctaacacggaacgtgtgtcgtaatgcgggttgaaggattgtgaggcgatggaccccgaggttacccgaaggtgacccgagagtgagccacttgaattatgggacaccctagctcggcgtcccgtatagaagaccggcgactgattacgaaacccgatggcgtatttacggagatccagaacggggaggcccgtaacaaggacgatgacaccgcacggaggcagcagatgacgtcatgaggtaaaggcgtgcagcatactggttggttggttggccggcagacgagccgccggaagataggcagttcagttcagaatttccaacaacgagacaaggtacttcttcatattagtctttgtgttgtgcagttagcgcctacgtgtgtactgtgactgtttcctacctacttgcgaagtgtacgcggggttctggattgatttggcctccccggcaaccttctagtagtgtagtgtgttgcattgtctggactcaggagatcagctctcagtgttcgacagtaggacactctaaacggtttagtaaggtattggtgtgcgtctcgcactttggtttggacccgcagactagctgcggcaggagatctccagtagatctcgtacatattgtacaacaagttgtcgtacagtgggaagagttacctcgctgtacaagtgcatccgcgacagagttaacctaagtctctgcctgcgagtgtaaggaaccccatattcaccccttcatattacacgtcttctaggaattacgctagataaagatccaagtcttgctacaagggtacacaagctgaggcctagagatctcgggactagttctcgttgtctttgggtatttggcttgcaggggtaaccccccccccgtagttgcgtggcaggacacgtgtgggagtttattagtttttatctgagggactccaccacgtacccggatctactagtccgaaaggggacgtgaaggtgaagggtgaggtgagggaagacggaactccgctgggaccggcggaagttaaacgtgaaaacactaggtccaccgacggacaggcaatggggacgcctgagccgaaggatttcgtttacgaagagaagttccccgtcaaggctccgaaaggagccgtccgggactcggtccaaaaaccgagttccattggacctgctgctaagcgggaccccggcgtcgctgaaaagcgaggtcgaaacctggagcgcgagcatctgaagggggtcatccgcgaccccgctgcccgaagcgatgctctagacgctgcgatggactacatggaagtcgaagatgcgaagaagaaagccgagaagaaaacgaagatattggagatctcggcgctagcggtccatggccccagcaacgacactcacgatgaagacaaacgatttcgtgaagccgaagtcaactacatccgtcaagagcttgcgttcctgctccagagagatccgctcctgcgtaagttggggctgacgatgccatggcccctcacgttccagttcgcaacctgcgcacgctaacaatccgagatccgcttcacgccgtcacgatgctgttctgcgtgctcgaagatgctggtttcaaggtacatgaacagcggactccaccgatgtacgcgagtacgatctggaaaccaccgtccttacgctcgcgtgggtgtacgcagtgttgcagaagctcgtcccgagtgcagatgactcatccgcgccgttgctgaccggagacctcacacctcctcggttggacgattcgcggatctccttcaagtttgaagatgacggtgacgctctcatgaggagcactacctcaaccaagaagcctccaccggccccacgtgtgtcccgccgagaacgacgtgcgcaagggatcccaccgatcgctgcaaacgatgtaggacgcgggaagtctgcgcaagtgtcaaatattgcgcagactcgcccagcgagaggaccacgtgggaggatccaggaggctcaagaggttgcaacagagcccgatcgccccggcggtgtggctgaagaccttctttaccagtttgcgaacgagcgagacgagcctgaagacgttgagatgcaacaagtcactgcgtctcccgctcggccacgtatcgggtaccgatcccagacacaaccggaataccaaggagatctccatgacctatccgatgacctcggctatgatggaggtggcggaaccggaggtcgtgtcgcagctgtgtccacggcgactaggttgcgagcatcagctgtgtccgaactgaaggacttcagcggcaaggaacatgacgaagaagccgcccgagcctggttcaacgaggttagaacggcttcccgacgggatcagatgcagccagacgagatgtgcttgacatttgccgatttgatgataggccctgcgcgcaattggtattaccagctgagccgcaccgctcgcgcgtcgtggactgacctgggtgaacagttccagatccccttttgcggtaaagggatctccctcgcgcgcaagtactaccacatgcggcgcgggagtcaggaagacccaccagattgtttataccggctgaatctggccgggatacgtgcaaacttgaagatccatgatggcaccaaggaacaacgacgtgaacacgtcgaccactacatcgatacagtccaagatgacgatctcgccggatctctggtagtgttgaggctgactgactcagaagctctcgaaggcgtcctgttggccatgcgacgccgccaccaacgtcgcaagattgagacacaaggttcgaaataccgccaaaaggctcccgcccctgcagcctcctcgaaggcggtgcgggttgtgactaccggtcgcggacgccgcggagatcacggagatctcaacgagttcgagggcgaatcaagcagttccgatagcgaatctgaagacgaaagagcgcacgtatttttggcagctaggacgcctacaccaggagatggtgaacagccaggggcgcgccaagaccgcgaagaccaactggggcgtccgaagtacggcactcgatgctcacactgcgaatctcgcaagcatacggatctcgggtgctggacgaggctcacgtgccagaagtgtggacgcatgggccatcctaccgacaagtgcttctacgtctgcaagtgctgtggagacgttcacgaagcaggtcagtgtaaaatcggcgacttcttcgatgctgttcgccaatggtacaacccgactcgccatgccggactgctgcccgagagcgtcgagaaggcgttaaactagaccgctcgccaggcctgaacagcctggcacgtgacgagcgatcgaagttctgcatttatgcatatgttcagaggaaggcgcgagcgttagaagacccaacttcctgtaatgcggtgaatacagccagatctcttacctcggacgaagatgactattcgcgtcgcccttgtgtgatggcccttcgactgccgccgggtgaacgccgaggttactggaagtattacactccctccaagtggttcaagcagtcgaaggcgaccggtgcggtcaacaatgtccgtgccgtcctacgctttgatactggagccatagtgtcgataatcgactctagctttgcacgtaaggtgggttgtgaaattgatacaacacagacaatggattgtgttggtgtgggggatgctgtgtactgcacagaaggccgagcagaagtcatgctcactctggctggagagttggtggcatggattttatggttcctgcgggggtgaggttggacctggctgacggaacgctctgtctgccggacgaagttcgcatccagatgaccgaccgtaagccactgtatagcagcaaggctgacgcggtctacgcaacgggattccatgaagtcggtcctggccaatggacagagatctcactcaagtcccacaacaagcggtttgaactgtgagtaacgagagggggaaaatgggtgatcacggtggtgaatggtggattcagtaacaagtcatacctccggatcaccaacatcagcacgagccgcctggtactggatcgtttggtgtgtttggcaatctggttacccgttgggcagatcccgcgtcgacctggattcgctaggaaggattcaaaccgctatcgggagtggcaaagacttgcgttcaaagcagctgtggacactggagatgcaaacgaagcggaagttgaagagtctggaccgctggtcgagcgtcctagctaccggactacgactgcgattttagcacggcctccacaagtgaagaccgttgtagcagcagcaacgtcagaagaatgcacgcgactcacactggacggcacacatcctcaaatgcagctgatgaaaagttcgactgatccgactagggtgaccgaaaccgaggaggacgtgatctctaccgatcccggtcaggtgatctctggtatggacagcgatgactcctgtgcgtccgaaagcgctgagcctactggtagctggggtagttttgactggcagaccgacgacgagaaagaagaggagccggtgagcggaatgctcccagtgaccaaggcgaaccaagccaaggcggagatgcaaccgacatggatgaagcgaagtatgttcatgaaggggccgatctcactgcggaagacatcgaaaaggagatggcggtgttaccagagatctccctgacggcagaagttaaaagggaagatctcaaggtcggggatccaactgagaacacagcagaggagattgatcgtctgcgtgatatcatttgggagcggcgtcaccttctcatcggcaaagcgaatgctttaccccctgcggcgacgggggcgatctgtgacatcgacgttggtcgatggctcagcgttgtcgccggatcccgcctcagttccgtgaagaggtgttccaactcgtcaaggggctactgggggcgaagattattcggatctccacttctccttgggcgtctccgatcgttatcgtcgtcaagaagaacggcgtggacgtccgactctgtatcgactaccgtctggtcgatgctctgacacgactgatgatctaccccatgccgttgattgacgacctcctcgaagatctcgacagtttgctgtggttctgttctctcgacatggcgagtgggttctgggtggtgaatatgaccgatcgagcccgagagatctccgcgttcattacgctgttcggcctgttcgagtggctgcgaatgccgtttggtctgaagaatgccccccaaatctatctgcggctgatcgacaatgcgttatatggcgtgctgcggatctcgccgggccaagatcgcgcggatctcgtcaacattttcgaggaaggtattcctgaagatcgatcgctgccgtcggtgctggggcgtcgctcttacatcgacgacatcttagttggagcaagctcgtgggacgaactatgtgagaaggtcaagaagctcctagaggtttgtgaccgctggaatctgtctattagcgcggagaagagcagttggggtatgagcaaagtcgactatctgtggcatcagatctcccgtgaaggcctgttcaccaagccgaaagatttggcaagtctggaggcgttgaagtttcccaaaacgcttaaggctctccagtcattcctgggcagtctcaactactacaatcgcttcatcgaagatttcgcagtatatgccatagtgttgtatgagttcagagattccgatttcatcaagggtcgagccacaaacgtcagcggaaatcacgaggcgactgtgagatggggccacgcgctacgagccttcgataccctgaagttcaagatgatcaacgcacccatgctctaccattttgccccagagttggatcctgttgtgattgtgtacgcaagcaagtgggcgatctctgcctctctcgttcagtgtcgtgatggagtgtacgtacccgtcaaatttacgagtaggacactgcggtctcacgagatcaggtacgacattgtggagaaggaagtactggctctgctaagaatcctcgatagctgcttcaccatgctgagtggtcgacacatccgagtgctcaccagacacacgactatcgcatggctcttccgcgcgaaaggcttgaagggacggctagctccgtgggcggcgctgctctccccccattcgctagagatcgaacgtttaacgaaaggcgaagatgagctactaggtttggttgccgccagtatcactccgcgcgcagagatggatgcagcgttgggggaaatctctccgcagaagaagtcgacgagagcattggctatcccgatgccgacttttacgcccggagaaaacgtttgcgtcgtcaggtttgacggatcggccaagtcgaaacgagttggtggagctttcagcgctgtggtatgggatgctcctggatggaaggttgtcaaggctgaatctggctatttaccggacctcactgtgaacgaggccgagtaccatggcctccttctcggacttcgtttgattgccgatctccagatcgactgtctcattgtgtgtggcgactccaatttagtcatccgccaacttgcgtggagagatggagtgcaagtcatcgggactccagctcttgcgtgagaaggccagagtgattttgcggtcttggccgcaatgcgaactcatccacgtaaaacgcgattggaaccaacccgcggatatgctggcgggacaggcgctgcagcgtggtgccggggtagttgtcgagagtcacaccgattacacgaacctcgagaccttgaatcgactggacgagctcctcaagacgcgcgaagaacgtgatgcccatccgaaggtaggcgctgtcacgcgaagccgatctcgtactgtcgcaccagccgtgttgcaggaagacgtcgtcaagcagctgcgcttggaacgtatttgccgtgctaaagaagaggaggtgtggatctggtcactgaagtgtttcctgcacggtgatctctctcagatctcgagccgtcaagccaagacgtgcagtaaactggctgacagttacgaggtcgacgagcatggcctcttgatgtactgtccagtcgaggggcgcggtggtgatgtcgaggaccgtggatctatggtgaaactggtaatgccgagtacactccacgaagatctcctgcatcatttccacacaagtgtggagggaggtcatcagggagtcagccgaacattccaaaagcttcggaggcctttctactggcgaggtatgttccgaagtgtgcagaagtatgtcggggagtgcgtcgactgcgagacgggaaaaggaaaacccaccttgcgggggcgatcgccgggcaatttcgccgctaattaccctttccaggtcgtggctatggatcatatccccaccctcccgaagtcgttcaagggcaacacagagctcctagtcttcgtggatctcttcaccggcttcgttgtggcaaaggcaaacgcggacaggaccgcaccaacagtggctgaggcatacgaggaatgcgtgtttcggcggtacggagccagcgaagtaatcaggcacgaccaggaaccgagcttcatgtccgactttttccggtcgtttaatgcgctgctgggccagcgtcagcgatctacgctcgcgtatagacctcaagcaaacggcacagcggagcggatggtcttgactatttccagatctctgcggatgtacggtgaagacaagaaccaacaggactgggatgaatatgcggagcggttggtgtttgcgttgaacacatcgcacgaccgagtacgcaaggacacgccattctttttgctgcacgggtgggaccctaaaacgactgttgaggcatcgttggctgttggagggaccggaagccgagacctcgacccacagaaatggaggttcaagatccaacgccaataccaacgtagactcgtcgtctcctcgccgaagctcgtgagagtcgcgcggaagccacaatgagaacgtaccggagtcacccgttaaggagggatcgcaggtgtggctgtacctcgaccgagtcaagttcggatacgctcggaagctcgctcacatgtggcatgggcttttcagagtcgccaccatggtgagcgactacgctgccaagctggaaatcagcgggactgactaccgactgttccctatcgtacacatctcgaagctgaagctggtccgacagttccccgaacgatccgccgaagatctcactgttgatggaagcgaacgatttgattttgacgaagaacttctccctgaggatagctgggaggcacaaactcgcggtgacaacgagtatgaagttgaagagatcttggatgtcaagacggagagacgcacccgctacggtcgacggctcaaggaatatttggtgcgttggaagggccacgcagagacgaattgggtcaaggaagaacacctgaactgtggtggtctgctgttcgacttccagcagaagcgacggagccggcagaggttccatgtgatgctatcgcgtggagaggccgacatcgccgaagagtgaggcggtgttgggggggggggggggtagcgtggtggacgctattcgtaatggtggatggtatttgttgcacatttacatttgattgagtggaagaagaaatggagagacgattacggaatggagaaacgaggttagttgtgatgatctggtcggacatttgtattacgacgaacgagtactcgggggcgacttggagatccagactggtgtcgcagtggccgaggcgcggggggcgcgaacgcgcgtccgacggctgctgaaacgcgctcgccacgacgcgctgggcctgtgcgatggtgaaaaccggcaccgttcgtgtcagagactacctgcgcgttttgtcgatattggccggatcgctgtcatcgccgacttggagcccggagccgcagtgcaggagacaccgagggcgtgaaggcgtggtcggtggccgtcggactaagtgcagtcctacgcctggagtttgtgctatgaccttgatcaccacaaatcacttcccagaatgcacggcgacctacgacatgccttcacatctccagttggggagatctcccagtcatgacattgactgagaagttgtggggcgggagtgatatgaaatggagtcgaagccggtgtattacgatgtcgataaagaagatgcatgctcggggagactacccactagctacgtacattggtgaaggaagaaatgtcgaacgctggagatttccgggggtcctcctaggtctgttcagctgactcaggctaggcgattgacgaggtcgccttgaacttgcctcgaaggctcgtgtggatgggttcgttcatcgatgggtgtttggcacgagcgttccagtagaacaggcgccacggctccgcctcgttagtcgttcgtaagacgtgtaacagatctccagaggcaccagaagctcccttagggaaccacgggcacgttgcgatcagcggcaggaagaatggctccagaagaatgtccaagtcgcacacatgagtcttgcacaggcgggccacctcttcgaacacaggcagcagcatcttcacaaagtgggatctccgattcttacgatccaaagtgaacttcacctcccaagacttagcgctggccttggaaatggaaatctcgatggagtgggtgatctcccagaacacaagtgcgccacgattatcgttccgagtcagcacatcgcggatgatggccagaagaggttggaagcggggatctccaatgtcgaacgagactgggtcgggcatgttatccaggaagatcttccagggactcgctttgtataaagcttcggccgaggcttgtggccagggccgatagtcagcaggaacggccagcttccccttcttagggttgcacaccctggcgggtagcagccagtcgcgtggtaaaaacttcgaagcgaggtctttggctgtaagctggtcaaggcggtgacctgcaacaacctcccacagccacggcgtgacatcggcagggcgcgcagcttcgctggactcaggtggaattgcgtgcgtgaatgggcttcgggctgatacagagatccacgggctgtcagacggagatctatgaaagtcgcttgtctgacaatgaggaggagctacgtacccatcgccgtagaggaagacaactcagctggcactccctcggtagtcgcaacggcgcgctttggacgcttcgactgtgacgttggatcagaagagagatctccacttcgctttgccgagccagacgggagctgctgcgaagatgttcgcgctggaggatcagaggagacaaggctcgtggccgctgacgccagtgtggcaagagacgaactggaggcggccgacgccacgcatcgttccacctcaggttgcggagtcggcgcaggtaccagattgatcaagttgcgcaacgctccaaggtgttcctcacgctccgctagtttgctgcggagatcagcagaagaagcctgctccttcagcagcgactgtcgactcgcatccagctccgcctgcaagtcgtcgcgagcgagggaggcctccgctcgctctcgttctacaaagcaataaacgcacaggtcagcacaagagtcaacccgccacattagcacgcgcgatcatgacctgcagccgctgcgcgatcctgagctgttgcgagatcagcctgacgatgctccaaactgttcttgaagtcgacgttctcacgccgtagaacggtgttatgctgagtcagccgagtgatcttcctcttcaactcctccagtcgcttcccagccaccttatgccgctgtgcgagatccgataacgatgtcgctgtggagatcaaggcgttagtgatgcaacatcaacaacttcagcacttgggacgacttaccaccgtcttgcgctttcttcgacgccgccgccgcttctcgtcgtgctgcttctgcgtcctcacgagctttggacgcatccaagcgaagggcgtccatccgtggcgctgctttgttgaccagcgtgcgcgattgcgccaactcggtctgcagcctgtcgattgtcgcctccgcttggcgcaattgattacgagatctgtctcgttcggcattggatcgttgcagggcacgtcccgcgcgtccgtcactagtccgatcatcatcagtggcagcttcgctggcagccaacagtcggccacctggggtaaccgatgcagtggaggaggagtccaggtaaaatcggtcatcgtctgcgctgataagtggtgtgccagcgccccatgtgagctccacccagcaaatgtttttcctatgttagcagattcttcaaagtattatagatggcacttgttgctgcacccgactgggaatcatgcgatgaggcagatgcacccgactggcacccgactagaccgactcaacccgactgaaaatagagctgggtttagagccgggttatggctatacactgacttgtgtatagctggatagaaaaaattgtgtaaaccaccttataaaagatcgactcactcagtcgggtcagtcgggtactcgactcagtcgggccgcctcagtcgggtactgggctcagtcgggctgcctcagtgactcagtcgggctgcctcagtcagtgtgtgaacgcagtatgcgatcataacttgtgagccaaaggatcactgcactacatgtagcaacgtgtgcgttgccgccaagtgtgtctctagagtcggaaacacaatagaacaacaacgcgcatcatgctaccctattattgatacttagtaggctattaattgcaagcaccccacccacgtgggcactgcagcactcctatcaacgccggtttacacaacgcttttctccaacggttgaaaggttcattattactatcaaacatgaaccgctaagtactataaagaagaagaaaaaaacacacaccacgctcagtcgggtttcgtcagtcggaacccactcacacacgtccagcctgagcgcagcggcgtccttgaggtaagcgcgtcttgtgacacctctgccagccgcacagcgagcatgtcttgattatcagcacagcgcggtgcagccgtccgcgtagcaatccccacaggcgctgctgtccgcaaggctctcgacgacgtgtcctccctggtggtgcctcttcgcgctgcgaagagaggcgcggtgtgaagttcgcactccgacgttctgacatccctaataacacccggttagttcgcattaccttcagcgctgcttcgcccaacgcttatatcgacgcgacggggccatatgctcgagctgtcgaaatcttgaatggcgactgaaatgggtggtgtgcaggggtatacatggtatgtatacctgtgcggatgaaggcaatacaacaacacgaaaatgattgaaagggtgggatgtgccagtcgggtgcagcaaacactctcattatagattggatggtaaattcttagttttgagggtgtatttgtgttcagtttggtgcaaggaaatatttcaaaagagggcttttagcgggttacatccacgggcgaataacaccgatagctcctttcgacgctgtcgtagataccggcctcttgggtggctttgaccgtgctgcaaccgatggcgccttcttgcgcgtgaaggagagccgactgccgcaaccaggtgggcactccccgagctgcggggggtgcgaccgcactgaagactgtggtgtcactggctggtgggcagactctttccttcgcggagcgccggttgctggcgtaggcacccgctcataccgctgcgccaagctcggcgacggcacaagccggattcgttcaattcgctgctgctttggctgaggcttgcgttttcctcggcttcggtcgctcgcgagcttctgcgccacagcggagtctgttggtgacgcatgttcgtagacaccgttccgaccaacctgaacgaagatctttggagttcgcactgggtactcttcgtactgctcttcatcttcctcgccgtagtcgtcgttgtcctcctggttgtcggaatactcgtcgttaacgaagttgtcttcatcctcctcgcctctgccgttaaagggcgacggtgtgttcgttcctcggcttgaaatcatcttcaacttggcgctgtgccgaggctcgtcctggtgattttcctgcactggatcttggttatccgccgctccgctgtgcttggcgccgccgttcttatgaatgatgaggttaccgcgcagacgatgttcattgatgaagttctgcaggtcggcctcacggacgcattgcctggcgcacaattccttcagctcgacatacttaacgtgggcctgccgcaactcgtcctcgcgctgacgcaactgcttcttgaggaagacaaccgcatcagcttgttcatccgccacaggtgtcgattgctgctgcctctgctccgaggcgggactggagtcccctttgtgattcatcggtgctacacccgagaattgcgggaaatccgaccacacgtgctccagcaaagcaggcaggtcggtcttctgatcgcaagttcgcatcctttctttgctgcttgttttccagtgttccaccttcgcgaggaactcgtggagacgctgggtgatagcgtcgagatcagctttcagcgttccggcatcatcaccgtccgagccacgaccatttgacggatctgcaccaagcgcctttagctgcctcacggcagtcttgagctggctcttctcgtgtttcaaccgggcaattttagcctcttgcaggcgaacctgttcctcgagcgcattcacgcgagcaaccctttcgttctcagtcatctgggcttgctcctcccgaatgcgagcagcttcctggagcttagcgttcaccttactgtccctagccgcaagctgggcctctaaggcttcaacttggtcacgaagctgctggttcttgtcctgctcatccagcagttgcgtcatcttctccagaactcgcttcttttctttctgcagctccgtttccaaccgctcaaccattttctcctccacagtggaggtcgttttgtgctgagcggctccgccagtaactaaatgatcaacctccatcctcggagatcgtttggctctacgagtggactgcgcgatatgtgtatcctctgactgcgatacttgctccagaggcgctggccgttgcctggattcacgagatgtagctgcactagatggcctcttctcctcacgataaactttcttacggtggccaccacgagcatgaatctcgacatgatcaggcacttcctcctcctgctcctctatccggagatgatcgagattcaatgaacgggtcggcgtatttttcatgctgtttctagttgacaagcggttccgaccgtcagctcgactttccgcattgcgactgttgtgcgatcgacgtccagcatgcactccccagtcctctgaaaccaccgtggtcctcatagcgattgtttcactctcatcgtccgatgacacatcagcatcctccgactcggacgacacagaccgctcagacgaagacgacgaagaagacacaggccgttcgttgcgccgccttcccaccggctcacgtcgagattgcctactcatcttcatcacctgcttcttcctgtgtccatactcactctgctctacgtctccttccacgcgtccctcctcgtccccactgtcatcttcactgtccaagtcctcctccgccccatggtacttcagcctcctctccacgttctctgtcaagtgtctgctgtacgtctcctgttgcagcttcggcagccccagacctggcgggcagtcctctctggctcgaatctcgcccgacgacaagaagacgaactccatgggccggttgctctcctgtatactgagcgggacgagaccgtgttcctggttagttcccgccgtcaagcgcttgtccacgagctgggggaagtcctcgtcgctctccgtctgcagcacgcgcttgcgcattctatagggatgctgcgggtgcagctgatcgtcctcgtcgagctcttctggggcttgggacgtgctagaagcggtggtgctgtgcttgcggcgacgtggacgaagctgctgcagttctgcgcccttgacctgctggcgctgatgctgcgagtggccgcggctggacgagcgcaggatcacgtcgtcggagctggcgaacacgcgcgcgtcctcagcgtggctcaacatggcggagagcggagcggatgaggcagcaacggacgtccggagagcgcggacggattgaaatggcgcgcggtttttcaaaacgacgggtgtaaaagtggtgtggtagagagggctcccactttttattcctaggtgagggtattcctgttgtagggtgtaccgtggggaacatatatcgtacggatttgctgcagtcacagccctaaaaaggctgctcaaatcgatgggtggaattcgtgcagataaggtgctcgaccagtttaccgcaatagacaccttttgcccacgaaatttacgcgttttcgagcacacgtttccgcacaaaatacgggaaagtcattcggtaaaattgcagaacgacatactgcttatcatgatatacctttgagatataatgttttctggaaacaatatctaaactaatttattgagtttcaatagtaattttacgagttgtacaaatagacggcatgcgcatcaaccgcacgacgtcggcagcgccgctgtgcttgtatcgaggtgaagccgaatgaggagtattatgctcacttgttcttgatcatagaagatgaaaattgacgtgttgcagccgtcgttaaaggcaagatcttcctggtcagttgggctaaacatattttttctaccgccacacagttgttatatagttccatatctgaccgcaaggcggtcaaaaactcgttgaaggcctcataaccaacagcttggctctgaacaggcttcggggcatcccatttaatcgcacttggtgcagaacgtgatcttgtgctggatgggtgttcgtcaagcgcaataaagctgatccgcttgcaaatcttgcatgagtagtacacacgcatgacgtacatgctgcagaatagtgtactctgcaaacatgctcaagcttttgacaatacaccaacgatatgtatatattgcaaacgcgtccgttgtttgctgctctaagaagtataagtctacgttaacaccaaaagtccttcaaggaaactgcacgcggtaccggttgtctaatcgatctttcaagtacgccgtaaggcatagctggaaaaatatgtttcaaggagagcagatttggtcctcgtgccagtcagcttttatgatgagcggatgaaaatcgtctggctctacgaacacgttaagcttagctaaaatcaatcgcaaacaaggcggaaacgctagtgtttgctataaggcggtgcttgtgtatagacgatggggttcaagaccagggattggaaaaaagaattgtaattgtacaagtgcaacaattgtgtaagtgcgatattgattgctgtcggtctggcaatctccactacatattgatcaatattgctaagaaggaatcaagatcctgcaagtcatctactctcttactggtagctgtcgacttctccttcatcttcttcgtcgtcttcgagagccgtctgcactgctttcgacgtgatctcgttcgtaacgagatcccagttcatccgtaggaagagaatagtctccagtgtttctgcgctcatccgcttgcgcagatacccgagcatgcacttcatagtggtgaaaaggcgttccacctcaaccgaagtagcagggagccaattcagatcgatatacttcgaccgatcctcctcccaggctttggcccggtcttcaatagttgccttgacttccgctggtgtacggcgccgtctgggggcaggttctgtcttcattgacggggtcgttacagcgcgaggacttcggggccttgatgcaggactcgtcggtgttttgctgcgcttcttcttcgctgctgacgtgcgcccgggtacgtttctgtttcgcttgcgcttcgaggtagatacacgcgcaggggtgttggtttcttcttctgggaagcgctgtagccggacaacagcgacggctttgtggtgtagcgggatcggccaaaatctggttaagacctgatggagcttcccaccagcgcccagacaccgactaacggagggggtcccccaacgatccgtgatcggctggacttgttctcaccttgtgtacccgtcggcgggctggatctgctctctcggggctccgaagatgcagcacttggtgaagatcgaatgtcttggcgtgacgcggggataggttgtggagcagcgcgggaatcttcgctctgcgtccgagtatacgctccgatcaagggttgttcgctccgatcggtcggcctggagtcgatccacggcctgtagttgcctttccaggtgtgttccttcctttcctgagttgcttgccgcttcctatagcgggaccgaggttgatcgagaggagaaacgatcgccggtcaagcagtatccggtcgatcgagggttcgcacacaagaaatagatcgctagagtaggtcaagctggccaatgtattaatccagtcttaaccgtaccactagctcactttccaaagtgtcgatgcttgccgaggccaatgtagttcctgggacttgatgacttgaggggacttgtgctcttcggtgcaaattctgctctgatttatgtttacctagtctctccctactgctaccatcttgcttgccctcctacaaccccacgattactggattcttgccccgacttcgtcctccatgtgcgtcccatcctggtcgatccacgatcggccccgatcggcgatcgactccgatcggccctgatcggcgatcgaccccgatcagcgacccacgatcggcgacccacgatcggctcccggtccacgatcgaccccgatcggcgatccgcgatcgatctcgatcggcgatccacgatcgacctcgatcggcgatcggcgacccactcccgatcgatgacttaagccggttgccatgcgccgccaatctatcaccttctgtcctcggccatcccagatccgcgggttctgtcgtcgatctggacttgggtcggccccgaatcacgccgcggttcgggcacgatcacccactatccggcttgccacatgtcctgccttacgcgccggcgtcatcggaccacctgagatctcccggagaactccttctgatccgtagattcttgctgtctgtctctcgatcgccgatctcccacgtctccagtcgatcggccctgccgcctttctcggagaacaattcttattcagtacttctccacagcttcttctgcggttagatcttggtcgcggccttgcatgatcttgacgacgccgatctcgaacgcaggagactccacgatgtcggcgtcggctttgaggcggtctgccagctcggggaagtcgaccagcgtctcgtccagaatgtctcgcactgcaacgagcgtcaggttacgtgcctgcaatcgtttcgtagccaactccaacaaatccatgtcgtctaggagatccaaaatggtgcagtgttcagctggactgggcaggtactgtacaatggggaaccgtcgcgtgtcgtcttcggggatgcacctatcaacttcgcagtctcgctcaaacaagaacaagtacggctggagctgtttgtaccgcttgagcatgcggtggatgccgctccaccgaagctcgtgcattgcaacgggcttccacttgcacccgttcgctttcagcaaggcgatgcgcttgaccgacttcaatttgcgcatcagaacagacaccttcttgatggtgtcggtgtatgctttgatgtagtccttgacagctaaattaaagcgatgcgccgcgcaacctatcataggcgcggagacacgtcgtgaaatggctttcttggtcaccatgttgtcgcagacgatgccgacgatgttcgcgatgtcgagttggtactggtcgagaattaggtccaggaaccggatgtgctcatccgccgtcatgctgcgctcatcgatgaaagatgacagggcaaggaatcgccatcctttgcgcgtcacgacatatacggccaacgaatgctctccgttgtcggtcacatcgtcgaagaccagcacatacctctcgtccttgagctcctctatgatcagaggctcgagcaacttgacactcgccaccatacgggctttcagggtcttcgagctcatagagttgaacttgacggcggcacgcaccgtctcgtcatccacgtcagcaaacgtgaagtttttgtggacgacgagattcatccactggtacgtctcttgcgtgtgccggtcgacgaacatgtccatggtgacgacgcgcttttcgcgcaaacacttccgggcgatgtcctcgtagccaggatgcttggacacgaggtggttgagtaggttggtgtatccggccctcttggtctgcttgacgaagttgttgcaagcgttgcacgtccgacccagggtgcttggttctcgaaacaacatggcaacaacagtcttggagtcgagttttgggccgagaagggtgaatgctgagttggtggccatgttgaaggaggtgtgagagcacgtgctgctggtcttgttgtacgtgagtcaccggcaggacgggttggatcggtcgggacggccttcgagatgcgttggtcttggggtttcgtgacttgcacgtgcgagtcgagcgacgaaaccttgcttgaggagcgcgatggggtgtgttcgattcgtttgcgggcgtttacaggcagtggtgtctgaagggagcgtggtgcagtggcggtgaggtcgggggagacggttgcttgcagggggtcaattcgaaagtgaacgctcaaacgactccgctgtctaccgtgctctcccgtcttgtgcggcctacccgaaagctatttatgcctctgccatgactgtgaagacgacttcaacttgaagatacacaattgatacgcatattgcaatgtattgaggagtatattgagattgttacaatattgattgagtcggccgcctcaacaacaatccataaacaatggatattgtccgatccctcgttcaagaccctcaccttcttagaacgcgtgacgaaagacccatttcgggtatatggagctggtcctggacccagtgtcaacgctggagcatccacgagagcttcttcatctgtccgatgtacacgtagttcgaggctccccggtgtaaatactgaaggtttttactttatgtttttgaggttttgcgggagaacgctgggaacacggtgccgcccgtggatctagggggatctaggtctcgtccggtctcgatcgacgccgctgtgcgaacacacgcggcgcgcactggactagttcttggtgcgtctacatccagtgtgggcacgggggggggggggggggggcggaccgaatgaacgatccggtatgtccccatccggtgtggcacttcttcattcggtacgccatcaccgggtgcaccacgatccggtccggacaacacgaggcttcatccagcagggtcttgcgtgcgcatgatcgtgtctggtggggccaattcagtggggtagcccgacaacttgactaaccaattcaggcagtggccaggatacgttcgctggccacactttcgcgccttgggcctatcctgcagttagggaagtcggcggacggactggattcgtgactccacaccgaatatgagcgctcatccggtgggcgcatctccaatcctgtgcgcccatgcttgctgcaagtgccgggtcccaccaaatctccacacacatccacaatccacacgtcacactcgtctctaccggatctccatctcatgcgaccaatcacagctcactgaagggttcacgtatccatggggtcggacatgagtgcagacaaaaatctgtttccacatcgtgtcaaccgcccctctgctcaggttctttcacagagggtcttgccaccgaggtgacaggacatgaccagacccatacacgatggctcccatttcgaatggagggtcgtaccgaatcgcaaaaccgttgagagggtctttccgagaacgcatgtcatccaacgtcccgtctccgtggcgggtctccgcacatcacaatccaactggcagaagcagtctgcctcgaaacacaatacattctccatcgagcgactcatcagcgctatggccgaagtgaacgacgcggccggggcgcctgacagcaagccatcgagcccggcacaactactgctagctcctccacggggaggcggtgacgcgggtgccaacttgggctcggatggaagcgccggcggctccggcaacaagcgcgcgtccagcgacggcgccaatcaaggcggcaactccaccgagaagatgagcagcggtgctacaacgctcaagcgcgccaccggttccaacaagaaagcagacatcgagaacgaagacgatacaaatggtcggcagtcttcacccgctcaagagggcgacaacttcacccagcgcgtgctccgcaagcagcgcagtatttccgggcgcatcttgtccgcgcaagaggccttcgccatgcccgcgggcgcaggtctcccggcagcaaccacttcggggcgccagccgacaacgggtctccagctgtgtggaaccctcctcccgagtacaagccggacggcgcattctgtatggtcagcgtccctgcgcgtctagatcacatcggcagcaaccgctttgtccgcgaagggtatggcggactggaagtgctaacgtcgaacgaggggctcactgctacggacttggccgaactgaatgagctggtcggcgagcgcgaggatgtcaacgaattcttccttcgccctcttgacgattcgcccaacccgaccgaattggagaccctgctcaattctctctctgcgcatcgcgagatggcttccattctgtctgtctacgagtgtcgcgacttggctgcgcgggtattcggtatgaccaccatcatgcggcgcatgctcgtcaagtaccgattcatgcggcaccaagttgagacgcagggatccggtacggccgacatgctgttcgccgcacagaaggagaacacgcaactccagatcgcgatgggtcagatggtcgggcagtggcaggtcatcacggaccacctcaaagaagagaaggagaataccacagagcgttaccgggcggacttcaagatattgatggccgagcacgaaagcgagaagcagtctctgcgggaccagatctcagcgctggaggctaaactcggtacatccaacgagtgtgtcgagtctctcgcgtctcacgccttcgacgtggaccgcatgatgaacttcctgaaccgcaaccagaccaaggtgaccggaaactggcggcgtctggaagagctgtttaagcaccacaagctcggtacgactcagccgtccgaatggcagacattgaccaacgtcacttcggctgacgacatgttcgccgagcccggtccgttcaactttcgacacgaggacgacaccgaagagaaggacaacggcgacaagtccggaccggatggcaactccggaccgagtgggggcaccaaaccgagcggcaggcgtgtctccattctggatcataccggtgactccagaccgaatgagcaggcttctacgcggccgtcatccggtacgtccaagtgtcagcatgaggtgccggaccaggtgcagtggcgtcctattgcatgggatgcgtcaggcgactctgctcgtccggttggcaaggagtacctgatcgacgagaagacagcgtgcgcctccttggccaacctcccgatcgtgtggcgcaaactccgcaccgacgtccagttggtcatgcacaccggaatgacgtatcacgccgccatgaaactgctggacaaggatacaatggctcacgacatgttctccccgttcgatttgtcctgcatgctggcgcgcatgatgttctggaaccgcttggactccacgtactggacgacgtacgtaccggaaatctactacctgcgcgcagaggcgatacttgaacggtggaccgacaacgatgagacaccggaatactggccggaccggatcgaccatactcaggacgacagcgacttgcttctcgggccggatgacaccgagggtgacagcgagagccgtgaccccgagtaggaacccagtgcggaagagaaagccaagatcgctcgggctgagaccagagaggataagctgcgcgcgctgccggtgctgttacgggactcgtcaagcactcaaaatccggtgtcacctcttcgcaggtccaagcgtcgtaccagttcgatgtcgtcgcagtcggattcggtgtccagtgcgcccccgtccaagaaaaagaggaaggtccgaccgagcgacgaacgcaagaagtcgcccctggcccgcaaggacatggaggacctcacaccggaggagttgacggtgatcgaaaagccgggtccgggcatcacgtcttggcgccacaaggggattctgactacgttcgcacccagtacggttaacgctgtcgaccagtctcccgggtttcctgattacgcaccgaatcacaatggtggttcgaaacccctgaaggcgcggttccggtccgacgagtacgaggacattctggacagcaatccctgtgagcgcatgtttcgtcgacgcatcgtacaccttctgttccacaagcgcagcgcgctaccagatagcgctctcgaagttctgtccgaagtcgtggtctacatgaaggagaacgcgtcgactttctggcacgccggtcactgggtcacgttcgacgcagacagcatggaggccgccaaggcccaagtggcacgcaagaaactccatgacgcagccatcaaggactacaacaagttggtcgtcaagctgaaagcgtccggagcaccccagaccatcctgtacgaaccgggcatttgggtgtaccccgccaagctctgtcactggatcctgttcgaccggtcggagacaaacgtcggcaccgagccatacacaatgatggagcagttggcgatcctggaccgcgtggaacccgcccgcatccagtggaccggatggtccaccaaagacttgatcgctgaacgacctccggagatccgggacatgcttctgactccagacgaattgcgcggcaactgggtctccgtcgagcaccaaaactagtcgcacattcggtgtcgctttccgctaactgcataattccacacacttcatgtccatcactcgtcttccgttcccttgtcactcattcggtctgcctgttccagattcggtccgtccactccggattcggtccgttcacactcgttcatttcaccaccacttgttcattttgtctgctaacactcagtctcattcacaatatccacacgtcgtcgttatcaaatccacagtcgaaaatcacattcaggttcaatcacttcacagatcggcggtcaggatcggtcgagtcatctggtgtgctatacactggggtggtcatcaccagcctgcatagactggaaccgggccttagcgcgggcactctggttgaactcatacagaagtgcaccacagttgagctgggttactggcaaccattccggatcatcgtatcctttccacttgacctggtactcgcaaatttgcttggatgtgcgagtgcgcttggtccaccggaggtccagaatcttttccacttcatactcgtcattctgttcgtccggctcccaactgtcctcaggcaacagcgccgcatcgaaatcgtcatcgtcattcagttcgagctccaccgtgggtcgtttcgggaacaacgctcgaggcttgagacgactgatgtgtacccacgggttgacgcggtatcctgtgtcctccaccttgagcttcacgcggaagtcgtcatggacctcgtcaatcctgaacggtccgtgccacatgtgggccaacttgcggctcaatcctgtctggaccttggggatgtaaagccacaccgaatctcccttctcgaatccggtcttcaatcgttcggagagttctttccactttcgtgtctgctcctcagatcgtgcccgtttcgcctgctcggaagatcctcagcacatgcaatcgcgtaactgtagtcgcgctgacacttccgacgccactcgtacgctgtacgctcgggcacactggatggtttcggtcccagcatcgccgacaccgttccctgtgcgtcccaaccgtgtaccagatagaatggtgcatccagtctggtcgcgtcgaaagaagtatttagtgcaaagatcagtcgttctgcatggtagattggtctgcctcggcaatgtaggcgcggacgctccgaatggcggtctggacggaccgctcctgttggccgttcgcctgagggcgattggccaaggtcgcgcgtttcggctacccaacagctcccgaaaacgagtgaacacctcactcatgaaacgagggtcctgattgtgtctgatcatcgatgacgcaccgaaattccgaaagactctctcgtcgtacgcttcagccacatcctgtgccgtcgtagacggcatgggtttacacatcacgtaaccagagaatgaatcttggaacaacagcaggaaggtgtttccccgcgctgacttgggcatgtgcgtcacgaaatccatagacaccacttcgaatgggcgtcgaggctcgatgttaccaggcgacggtccaggattgggaggtcgcccctttccgcttgcacaatcgacacactctttcacgaaacgttcgacatcggcatacacaccgggtcaatagaattcggtccggagtcgttcgtgcgtgcgtgtgatgccttggtgtccaccttggaaatcctcgtgagcgtagtgcaacaggtcggcgtacagagtctggggcaccaccaggcaaggttcatcctgtacgtcccgaggtcggtcccgtgtggaacgcgcgagtcggtacagaacacccctggcgtccagcgcaaacagatcggagagcttcgcaatcttccgtagtcgcctgggagagaatcgatccaggtctccactcagatacgctctgacttctgcgatgaactcatcctggtcctggagcgccttaattcttcgccaccgttcagcttggaactccagcggacccaatggctcgctggattcggtctgctcctgggttctcgaccgggttaagaccgccatgactcgagcacagttgggtagcggtgctgacccaggatcctgttcggcactgtctggtgtcacctcatccggtgtcgctgctgcctcggtcgcatctccattcggtacgtcttgaccagcttcggttacatccggtgtcacaacaactggcttcatcagcttctcatgaatcttcgatactcgctgcaggtgggttcgctcctcttcatcccgtacggtccacgtggcaccaagcgctaatgtcttggaggttaggtaatccgcggctaagttgtactcacgcttaacgtgaaccagtcgcagcgtaccgaatcgcccctccagagttttgcactgggccaagtgtcgttggaggttgggctggttgcaattgatcagcccttggacctgctgtatcacgatgcgagagtctccaaccacaatcaggtccgtgataccacggtcaagtgcgactccgcaatccggtccagatgctccctgggggtaatccccgcacccagtatagtagccagaccatcttcgtcccgctggatgcggcgaacttccagatcccactgagatagggcgacgccccacggcacacagcagccatccgcagatttggactggatcacccacttgattaccgaataacgggtgtacacaatcaacgggcacccttccaggatcgtcctgaacacatccagcactctcatgaccgcaatgacttccttctccgcggcgtggtaccgaatctctgattcattcagtacgcgccccgtgaaacgcacgggctggatcagtccgtcatgctcttgtccgaggaccgcgcaggcggcccacttgttttgcgtgcgggacgatgatgaacggcttggttcggtccggatgtcggagcaacgcggtagacacgctcttccgcttcagaatctcgaacgcctccttcgctcttgacaggtccctgccggcgcgcacctgatcatcactgagctcgtacagaactgcggtcactaccggaaaatcttcgatgaacttgtggtagtaattcagactgcccaggaaagactgaatgcccttcaaagtggacgggaacgacagatccagtactcccttggcgatcttcggtgtcgctcggagcccttcagcactgatctcgtgcgataagtacggaatcgagcgcttaccgaattcgctcttcggcagactgaccgaaatgttccaataccgcaaccggaaatgtagtgcatctaggtcaatacacagttgatcccacgtaggcgccccgtgcgcgatgtcatcgatgtacgaactccgtccgaggacaggacccatctgcatcggcgccagaatattgcgctggaacactgtcatctggtccgtcaatgcaggaagttgtcgaccggacaggatctcctcgtcagattcggtaccgctcagcgcgacattgtcgtcttgcggcttcaagcccagagaatccagtacgtcctggtccacttcggcttcctcatcgggcggcgaccgaacaaaacaccacaagcaattcttgagcacctgctggtagaccaaaggagcatttttcagaccgaatggcatgcgtcgccactggtagtgaccaaatgccggcacaaacgccgaaatgagcttggctcgctccgtcatcctgatcgcccagaagccgctggccatatccaggctcatcaaccacatcgcactctcgaaaccgatcaaaagatcatcgataagcgggagcggatagttggacaaatggatgaaaccattcacaagtcggtagtcgatgcacatccgaatgtcaactccatttttcttcagcacgatcacgattggtgaagcccagggtgatgtggacgtctcgatcaatccggtctccagcgacttcttcagcaactcgtacaccttcatcgcgagatgcggtgcgatcgaacgagctctctgtgcgaccggcttggcatctcccacatccagatcgcaaacgactctacgagctggggcaggtgctgcattgccgtcgcctaagaaaatccgccggtggtacttcagaatgccacgcaaccggcgttcatcatccagtctgctcacaccaggttcaccaacatctgctttgtcaatgtcgcattcggggctcagatcctgtacctccggaaggagggcaagctgatctcgcaactgcgacagcagatcgctaccttcgtggatgtacacgacaggctcaaaagccagttcttcagcattcagtcgcataacccgttcgtactccatctggagcttctggacgggagtgccggacagaatctgggaagctaagtcggacacatcttccacggtctcatccagtccgtcttccgacacttcgtattcatccggtgcgaccgcgtcgaaaaaagtgtcttcctcttcatccggtgtggcactctcatctggtgcgaccacgtcaaagaactcgtcgtcatcatccgattcggtatcatcgaaggagatttcatcgccgttctgactcgcagcgggtttcggtatgctatctggctcggcttcactggtcaggggggttaggcgcttgaacgtctcctcctcctcaaccaggtcctgcaggcgactccacaatcttgtccgacttgactgctggattctgtagcaccgctgtgaaacacgtcacgtccttctttccgtccggatgcatcatcaatttggtcggccaggtgtacttcgcaggttccacggcgggcggttcacgatcccagagcgcctggaggcggcgttactctcgcagcttgccctgcttcgacagagtgttctcatagatcaacacctgccaccccttgtacgcccttgatcctggacggacaaaacgccccactgatgggaagaatccatactccacaatgtaggtcaacgtcgttccggccgttatccagagattgtactccgagatgttcaccaccttgaccgcctcgggccaggacttcgctccgtacacggtcttggtcacccagcggtcgccacgtccggcccacaccacctcgcgttgtggttggcttggccgaaccgaatgcgcacgacagcttcatcaccaggtcggaggtacagggtctccggcgcttggaccggcaacctcatcccttgccgacgctgcaccttgtctccgtacatgagaagaggctcttcatccggtagctgcagaagtacctcgcggatgcataaccgaactccagcacagaacataaagttcatacccaataatacgtccacaccttcaccgatatttgcgacccagacatccatgacatagaccacactcgcaccgagcgtgatcttgacttgggtgctggcagagatgtaggtgggtttgccacccagtccggagaccttgatctgtttgtgtaggttgatcttgatcttgagtctacgcgcaagatccaaactgatcatgctcaccgacgctccagtgcccaacagaatctccagtcgcaaatcgttcactgcaccatgcaccgtagccacctcatgcgagtccttatccggttcgtgatcaacccaccatccgtaccgctcaccgggttccagctgaaattcggtctgcccgtccggtcctcgcgatccagaatggttccgtacagaatagtcgtcaacttgatcagactgaatcgggtcgtcattgctcagagaaatcatgcattgttggtggttatcttggttgttggtcctcagctccggtccgatataggctatcacacacaattcagggggcttacgcccggcgcgtactgggtccccacccagcgggcttagtggtttaactgcccacctgaatctgccttgtcgtccagcagctgatccagtatgttcttcggtatgtccttcagggctccttcttgtgccagcttcttcagctcttccacggtcttcgcaagtccacacagtccgttatggaaccgaccgcagattctgcacgggatggtcttgcacacccgcatcatgtgtccttgacggtgacaacggtcacacacgatgtccatctagcaattctcctgtcgatgtccaggcctttcacacttctcgcagaactcgtgccagtccgaattacttcctcttggcgacggcggtgcggaggacggaccgaatctcgacgcccctgactgctgttccggaggcggcggcttccatcctgaacccgtcatcacacggaacaccgcattgcgcagaacgtcttcattcagtaccgccagggttggatctggtccggctggtcgtgctggggcaggcgggaccggatcatgattcggtgcggtcgtcagtgtgcggctctccgcttcatcctggaagcgcacgtgtcgatcctccttatccgattcgtcttcgctctgtgcgatgtaagcacgtcccgcaggtttcggtctgtaccgctcgcgatctcggtctcggtcccgacgcggattgtccgcgcggaagtcacgtgttctggacgagttctcgcgttcactgtcctggtagtcgtcttcatgctgacgcagaattaactccaggtcgtcgatgctgtgtatgcgctgactcttcagactggaccgcaaccttgattcggagaggttccggatgaaccgcttgatgtgcatctcccgcgtcctcggcgacttcttgaagttcacattcgccttgttcgccccagcattcagtcggtagaagaagtcgagggccgattcggtccgcttctgagccatggtatagtatcgccccgaatcggacaccttcgaccgacagtacttgttcttgaacgcgcggggcagcaaacgccaggtgtcgcgtgtgtgcctcggcagttgttgacgccagttgcgggcagacgaaggcagcttcaaacgcagctcgtataccttcatgctgcccgtccaaccaccttggaccgtcagggtgaggaatcgctccctccatgttgtccgttcctggtatggggccttgtcgtcgaagtcctcgagcgagccggagctcacatacggtctgaagttcatcactgtcttgccatattgtgtcgtcaccgacgtggagtgcgtgggcacgttagccagcgagtcggacgactcgctggagctgtagccttcgtcgtagccgtcgtccgagctcgagtccgggtcagatccggagggttaccgctctcgcggctccgcctaccggatgggcgcttgtgcgccccagaaccggtgtccctcgcgtccttggagccttcacccttcatgggcggcttcttggcgtccttcgcaggggcatcctgcttgcccttcgccggcgcagccagcgcagcgagcgccttggtcgctcgcgccttgagaacaccatcgatcgtcgcttggagttgggctgctagaagctcgtcggggcgtggcgtcgcagacccgatgggcgcctggtcggactggataggcgcactcgcagctgggtgcagagtcgcacgcccggtctctgtcttcacttgcgacaccgaatcaggtcccgatgttgcttgagcagctggattttcctggcgtgttgcacgaaggttgtgcaactggtgggcctgaaaccgctgaatgttccgggaagattctcgctccctctctcgctccacttcaagtttgtggactttctcttggaatatatccagttgagcgttcagtccccgctggacgtcttcgatccagcgtgctcggtcggcttcggcctgcgcttcctgctgcttccagcgttcggtgaactccgcggcaacgcgttcgcgctccaggcgcgccgcctcggcgcgggcgctctgtatggcggcggcgacgacttcgtgctcttggatcggcgataccggggacgggccggacaggatcgggggctccgggaccggagcattctgtcccaatccggtctgccgactaccttggaggacagcggtgcgtccggcgagctcctgaatcgcgtggagcgcgttctggagtccttcacccagtcgagctgtgttcgcagcggacgcctcctgattcagctccatcctggcaagggcttcctgagtctggcgcatcgtattgagcgcgacttgggaggcccctgacatcacggacatcgcggagtgactgaactgaccggatcgactcgatctgctcgaccgactcggtgcgcgcttcgacctcgacgatcttcggcggcgactccggtcgtcctcgctggaatccgactcgcttggtgacggactccgcttctcgcgcctggacgtcgttcgcggaccggatgacgctctcgaccttcggtcactccggacggtggtgcgatcggactccgacataacgacatcgtcctgatccaccgccgtcgatgaccgagggagtgcgctccggatgatctacacggttcctccgctagtgccggactgaatcatccctgcttgcgcggtcatcacaatgggtccgtacccaatcgcggacatgtgcctcgcggcatcgtgtccagaccacagcgacgacgaagacgagctgcctctggacgaccgagctcccgatgccgcactgaatgtcgactcgttggatccggccgtcgtaccgaacaagctcgaatcaagatggcgaacgggacggcggaccgaattgaaccagcgctccggtaccagatgcgcgtccagactcgctggatgcgtggtacgaagggagcgacgacagcgacggtgtggacagcggcggcgcggacgggatcgacgatgcggactggatgaacgaccggcgaggcggtccgtactgcgggcgcttggaatccggttcgccggtggacgacccttgcgggctccgtgtccgccggagtccggccactcgtagacgcaggacaaactcgcgacccagtagtccagcctcgtaatccgacatcaatagatctccgtcgttgtcttcagcatggtagtccaggatcggtgctcgcacagcttgctacggcgtcgatccagtgttcccagcattcggtccggtcaggtcttgaacgtccggcgcatccagtacgatcttgaaaggcacaccggatgccagctcgcgccactcgatcagctcgaacgcgaggaaatgctggacgtcttcgaccacagagcgcaccaggctcggtgcgactctggaggacttggaatggaaccacatcggaatcaggttgtgaaacctgaaaccggcagcgaagaggagggactggatgagcgcaacgcactcgcgcggcgaaagaatgctcggcggaatcacgatacccgtgacatcctgggccagacactgctcaagccgtactgaatccagttccgcgatccatgcagcatcttgacttgccatcgccattcggtccgacaggtacttcgacgtcgccagcgcggcggcccaccattcggtgaagtcgggtgccggctcgggccaggcatactccaccttgagcgggacgacagcgctttcacgatgctgctcccagcggcgcacttgctcggccacgtatgccttcgcctgagcctcgctcacttgggccttggtctcgtcgggtcctcgcgaatccgagggcgccagaccgtattgggcttcaatcttgagcgcgggtgcttgggcagtcgcggccggaccggatggcgcaggggcagaccgggtctcggcttcgtcgttcagtacgccgtcttcttggacagtcgacagcgggccttcgtgcttgatcgtcggggcttcatccagaatctcgacttcgtcatccggctggggagagtccgaaactcgatcctcagccgggggctcaacctcatcggcgcctcccacagacgcctgggcgggttcatcatcctgtgcggactcaccctcatccagtcccgtcgccgggtctgggacacatttggtgccggccggcacagactcggtcgagtccgcctccggagcctcatcctggtttgcttggtgcgcatccagaacggaggactccggggccgcttgatcttgaacggccgccgacgccttcttcttcccttccagggccaccttgcgcttctcagcaccagccttccgagcctcccggagaacgtcgtccagggccttgtgctccgccggcggcagcccttgtcctcgacgcgactgacgggacgcctcaccgcgtccgcctccgcgtccaccttcacgtgcttccttccttccagtcataaccaaacggttagtccaggtagtcagtagaaacaccccttaagaccaaatcaatatacaaacaactcgcggtgaaaccctaggcaaccaaatccgggtacgcgcaccagctgagtcgaggcgggtgaacgcctttatcgtccagggtgtatagcgcactatgccgaaccgaatgaattcgggttcggagtaccagagattgtccacgcgatagacagcccacgggacactgaatgacccgggcctggaaccgcttggacgcgccgaatcgcactaatgcggtccggtgtttggcgtgtgtccttgtgtcaacccctataggtatcgtttacctttggcggaccggatttcaccgagttgagttgttgcgatacagaataaagtctgctgggtgtgttcctgggataaaccacaccgaatgaacagaaggtcagaccgaatgaaaaggaccacagtcagatccgtaattcagaataaccaacacagagaaatacaataccgagctaaacgtcacaaaatatacagccaccacttattctttgagacccttgggtggggggtctatacaccagtcaacttcggagccgtcacccaaggcactggccagccctggatgcacactcacttacgcgcaccaccctcacagaatgagggaacaatacaaaatataattcagtcctatcacacagtagtcaatcaattcggtctggggggtgactacctcaaccaccaaagacacacagtagggaatatgaaatggatgcccggttagagcacgcaaatagaaaataaagctctcacaggtcactccggggtgcgacaccccagtcactgccgattttgccttggtacctttgagtccccactacaccagtgctcgctacaccagtgaggccttggaagcgtccctaaactggcttagaccgcgcgcaggcagtctcctggagggctcttgaagacgtcaaagtcggggtgctacttctgccccgagcacagagtcgtccgcgtgttcttcggcaaattggtttctgtttagattttacgtttggctagttatcttctatcacttcgctgactttaatgtaggtttcactatgattcgcgtgtcttgagtatgcttgtgcttcttggcagttcttcagtatgcttgtcttggtttcggtatgcggagacttgttgatggtgacacttgttcgggtacactcatcagatgatgagggaggtatctgggtatatcgtctcttcgtcttggaactggacctctcccttggatctgcggctcattcggtgccgcccgtggatcttgggggatcttggtctcgtccggtctggatcgacgccgctgtgcgaacacactggactagttcttggtgcgtctacatccagtgtgggcacggggggggggggggggggcggaccgaatgaacgatccggtatgtccccatccggtgtggcacttcttcattcggtacgccatcaccgggtgcaccacgatccggtccggacaacacgaggcttcatccagcagggtcttgcgtgcgcatgatcgtgtctggtggggccaattcagtggggtagcccgacaacttgactaaccaattcaggcagtggccaggatacgttcgctggccacactttcgcgccttgggcctatcctgcagttagggaagtcggcggacggactggattcgtgactccacaccgaatatgagcgctcatccggtgggcgcatctccaatcctgtgcgcccatgcctgctgcaagtgccgggtcccaccaaatctccacacacatccacaatccacacgtcacactcgtctctaccggatctccatctcatgcgaccaatcacagctcaccgaagggtccacgtatccatggggtcggacatgagtgcagacaaaaaactgtttccacatcgtgtcatatatgggtttggactattactacggcgtccatttagagggttgaggcgccaacaatggcgaccatttagagaataaagaggtttttgatcagttatagaacatctatagtgaaatccatataatcccgttagaagtcgaggaatcctaaccagataaggaacacatagtcagttagtcagttagagggattcatttagggaggtgtcactgtagcaagttgcacaactggctgatacagacaaagccttgagaggggtatggtgtggcaggccactgtcacacgtgcgccaccgcgtgtgcgcggtggccaatcagagctcactataggttaaatggtggggacggtctcgggtttcgataccgtcttcacatcgaatgaacagggttatatttccctgcgcctgtgtaggccagtaacggtctaggcccgtcatcaccgagcaattcagctatcgactcaattagagcaaatcgaagttcctattgactgtgacatgcatttcgctgcctacgatttagaacggtccatgaatatatataatgacggtgtttgtgttatgattcatatcacgattggtcacgctctgtaattggttggacaacataatattttgattaggccatttgctctagcactctttgagaccggcaaagtcaaatgtaacaacgacaaactcttctgttctcatcggattcattataaactagttggatagttgcggaaatgagcaagcagcatacccacggagtgtcatcacctcagtatcacctcagtattctatgcggacaacaacgagtccgagctcacttgagtgcaccaccgcgagcactaacctgatgcaaaatacaccactgagcctccacaagtccaccatgctgtcaaattagtatcattagtgctgttcacatacacagaagaaaaatataggctataagcattagcagctacccgtaaagcatttccaatccttgctcgttgctcgcctcctcatcaggtgtgtatgtactagtttgagtctgcaccggcgccttctagaggtccttaataacgttacgccgaggaaggcttggccgctggtgatcgacaacgatagcatgtatctcggtgcgtacgaccgtgggcgtggttgtccatggccactgccccgggaaggacttgatggtgagcgcggtctggtcgatctgcacgggggttgccctcgtacaaaccgagctctgcgggcacggctgagtcggccgacagagtgatgcatacgagcagcgcggcgttgatggtctgatgcacgtcgcggatgccctgggccttgagctcgacgcaggccttgagcgcggccactgcggtgccgaccccgagagagtcgtacccgccaacgacgttgagcagctgcaggaatagcagcacgaagaagtcgggcctgttcttggtgatggtttccacgaggaattggctccgcggagcgggcaaatccagccactttgccacgacccacaccggttgtgtgatgccgctcttggtgcacatcgccgcctacgcttcgccgtgctattccacgatgtcttgatgtccgtcagctcacggtgtctgcatcaccattctcgacgtgcgtcatcctcttttgatttatcgccttgagaccgtagcgaaaggtcatgatttcgtccgtatcacagttatcgtaactctacctcatttatatcgcaccgtactcaagccgagtaaaaatgtcatagatcatctggtcattcacgccaactgtgatagatttgagacatacatgtgccttttcccaggaagaaggaaccggagcgcgacgtggtcttgtcagttggcgattcaagtcgagaagcagaaacatgggcgcggggagcaccgcgcccgaggagcacggcgcctacgaggagacgttgtagcgatgggcgctgtacgactgcagcgccgtcgtggtggggcagaggcgacgatgagatggccgagatcttccggcgttggctcgcgacgcggagcaagcccgtcacgccgatcggcggcgtgaccctgagatcgctggattcggcgtggaccgtgttcctcgagcgctggaacacggcgaccggggctgcgttcgtccggaagctggaggtgcgtgaggcgacgcatgctcgtatggctctcgggctttggcctcgcaggtttgcgcgctgttgtgggagtccaatcgccgccgctgcctcgtacactttctggatggctgtcagagctgacgcgggtgttgcccgcggaccaacacgctggaatggctggacatcctcgaagacaccacattgtcgaggacggagcgtgacgtgactggacgataccgcgaggcgctggacgcctttaggcgcggcgggcgagcgccgcgccacctggaggacttaccaccggtgcgaggcttgcctcgtacgctgccacccagtccggaacgtccgcaaacagcaccgcccgcggctcccagctatccggcatcgggcccagccaacgcacaagatactggcggtgtgcaggaacggcagcgtcacggtgggagacgctaacctcttcgtggggcagcacgagtatcgtcgtgccgtagaatctcctccacgatatggcgaacgttgctcgcactatccagtagaggggcaggaccgccgcgctcgaacggaggggcgcgatcgctttccggaggctgagatagctcagcgtctggatcggatgaatcagtggcttaacgcgctccagcggaagaatgaagacctgcgtcgtcgtgtgcgctggcaggaggcgccgcgtcaggagtaggcgccgcaggaaccgcgtcggggcactcgtcgctggggatagtcactaccaggtagcgtcgcaggcgaccgacgtagaaggtaggatgaagtcgcaaagctgtaggtagctgtagtgtgtaggcgtcacctatatcttatcttgaacggtctaataaagcgaggtgcgagcttattcgcgtccactaccagtttaggttgaatgccggccatggataaaaggacacggtcgcccacagcaaatcgctcgaagttcttgcggtcacggcgatcggcattcgctttctggtggtcgacggccgtcacgatcgggccatgcacatagcggacgtcggattggcgacgctgcaggaactcggtggcagccgctacaccacgcgactgtggttcaggattggggtcgaatttgcaggaggagacgcggcggcttccaccgcgcccggcgcgtcttgatactcaactacacgacgacgctgactcggatcaatcagtgtccaacgcgtccaggctgcgatgttggatggtgtcgccctcgtggtggcacccacatgcgtggctcgcctgcaggagaagcggttggcctctccgataccgccgtcgtggcggcacgcgtgcgcattcctctggctgttgatcgagctccatgtcgcgtagtgaccccgttcatccgtgcagagtctaccacgtgagtggcctcacgaccggtgtcgccagcagcttcagcgcccctgtcagcctatccatccaggccagtcgagcgctccacaccgaggagcgccggaacacgcgggtgtcgcccgaagttgatgtcgaacggggtgagccccgttgactcgtgttccgcattgttgatggcaaagtcgaccatgggcaggaacgagctccatgacttgaaggacgtggggaagcccctcaacacgtcttcgacgaccctattcgcacgttcggtctggccatctgtctccgggtgcgacgcggtggacatcgccaaccgagttcccaccaacttgaacaactcggtccaaaaggcggtgaagcggggatctcgatccgacacgattgaggtcggaagaccaggatggcggtggacgatgtcgaggaagatcaccgcagaatgttgtgtggtgatggtggtagcgtcaggagcaagatgcaccatcttgctgagacgatcgacaaaaacgagaacaccagtgcggccttgccggtcgcgaggcaatccaaaggcaaaatccatgctcaccgaagaccagggtttgaccgccacagggaaaggtcgaaacggagcctgcttcgtcggagatggcttaccacgctggacgcttcgcaggagcgtacccacttctgtacccacttgtacatatgcggccagtagaagtctcgggacagcgacgcgaatggcttctcgcgtccgaggtggccgccgctgggcgtgtcggggaactcgtgaatcagtcgagctcgaaaatcgtcgtcgagcggaacgacgatgcgcggcgggaccgcagctcttagcgatcgatccgggcgcgactacggggagataagtggcgccgcgccgctgctgatggatcgcgtaggtacttgattatttcggagcgggctggtcgctgcgacgtcgacagcagcgacttcttcagccacacacacagcactcgtcgtcatcctcgtcgccaactgcgtggcgacccgactgcacgtagtctggccggcgcgagagcgcgtcaacaaagatgttggtcttgcccgacttgtagtgtacgacgatgttgtactcgtagaatagcaagagcaagcgagccatgcgctgggacaagtgagggctcttcgtcgctatccgcagaaacgcatgatcggtgtagacggcgaaggtctgttcactcaacaagaatacgcggaacttgatgagtgcatagcgcatggcgagcagctttttctcgtgcacggggtagtgccgctccgctggcttcagctgacgcgactggtagctcaccactcgttcgcgtccctcatcatcaaactgcactagggcgcagccgattgcgaaggcgcgtgcgtcgcacaccacttagaaaggcttcgcgtgatcgggcagcattaggatgggcgcggtagagaagctcttcttcaccgcgtcaaaggcgagctgatgctagggacgccacgtccacgtggtgtctgtcttaaggagctgggacagcggacgaatggtcgaagcgaagacttcaagtagtggtggagatacgtcgcgagccccagccactgtcggagctgattctgatcccgcggcgtgggccacacgcagataacgtcgatcttctaggggtcagctcggacaccttccgcgctgtcgtatctcccgagcacagggatcttgggagcgcagaagatgcacttcttcaagttagcgtacaacttgttctccctcatccccgcgcacaccttccgcaggtgttgtaggtgtatcttgacgtctgtcatgtcgccctcggcacggctgtgatacgtcctccgcggtgctattcgatacccgtcgggccgcgggaccagcgcgagggtccgtgccaacgtctaccacgaccttaacagaaacttctatctaaatgcaaaggggaagtttgcgttcgatcactaaaccaagctaccgacataattcccaactacccacaaaaatatttccctggctgtgttaaataagaccagtgccgcgggactacccctacatagccacatcttcaggtcgcgctacgcttgtcttggctgcctctgcaacataaggaccggcgtatggatactatgaagaaggtcttcaatgccattcggatcgtcaaggtgataggaacgcttcagcgttgaactgttttttgggctcagtatagactcgccactggcgaagccgagctaatgtgggccacataaatttgtactagcataaagtattacccgatacttgttttctatacgaaagtattgtataaccgatatttttaccggacctccagtagggccagtaatactaataccatgatttggtcgattatcctaacctctgcccacaacatcccgctcagcgtgctgaccgctgtcagcggcacgtcgtcctcgcgcatcaagatctgataaaagccgtgcatcagatcaatggcactgtacttggtgctgccagacatggtgtccagctccatgtccttcctcgggatcggcgtttgcgccggtatggcggcgtcgttgagcttgttgaaggcatggacgatcctcccgccgccagttgctttcttcacgcagaacgtcggactggaatgcggagacaggctctctctgacgtggccggcttgccggcgactctcgaaaatggcgtcgatggcttcaacttagtcgcgtggaagcggccactgccgtgtcacgcagtacttcgcaccgggcacgaggtatatcttgcaccgaactccgcggtcgggtggaagaaccgctgggaccttgtccgggaagatttccatgaactcacgcacgagtggagcgactgggttgccggctgattcaagtgctggcaacgactgagctgcgtgcgttctttggctcagctactttcgggcgcatcctggcgtcggatgctgggtccgacgctcgggtagtgctagccgcgctcgactcggcgtcttcggcgacgatcgtgcacacctgctcgacctcgcccttcttcaagtcacggagacagtctttccacgagggtccaggcgtccgagtgatctcggtggcgccgcacatgacgtgcgacttcgacgttgcgtatatgcggagtcgtctccgcgtcgtcccccaccaggactgagagcatttccgcctcagtcgcaaccgaaccgatgctcgaccgggtgtgggaggccacgctcaaccacatcttcttgctcttcaacgttggagagctgctgctcgtccggacatggctcgaccacgtcagtgtctgtgttcgagaaccgctgctgggaacccatgctcgaccacgtcagacacgtcctgaggttcctgctcaggaccggcgcaggctgcgagttcgcacaccgcacacgaagggccatcgcacgcttcgtgcgcagcatgtgtcatggagtcggagtccaagacggcaacatgcgaccactggttcggctttccacataggaacaccaacactgcattcacatcaatgtctcggggacggactgtacccgtcatctcaggctgagctacgggatgccgaagacgcagtcgaacgagccgctcagcacgatcaccaagaactcctcggaactgcggaacccgtcgaactcgtacgcgaaggtcgccgagcgccgcgtcttcccatcagcgtacttcacgatcatgtctccaggatcttcacgaatgctcatgtccgccggtaaaaccgacaagctctcggcgtggaggctgaacacaatcagcctcgtgtcaccgccggaggtgttggcaaagagttgtgcatggagtacgggagggcttggaggtggttcagccaccagagaaccatcgctccttccacgaccagtagggtgccccgcacctactggttgtcgccgtgttttggagcggcgacgtcgtgcgcgatcgggacgttcgcctgcatcggcgccggggcgcggcaaatagctgcgcgatgtccaggtttcccacagcggtagcaacgcatcgaacgaggagtgcgcgttgccgttgccgtggccggcctgactgacgacgtcggcacccgacgtccaccatactgttaaattggatcgacctccatcggctccagcttgggaaccggagcccgagcaacgtggaaacctgcgatgcagtcacactatagtcttcacgaatcgcgatcacgaaggccttttcgagtgtcgatggggtcgcccgggttaggtagacgcgctagtagccagcgctcatgccggagatgaagacgtgtacttgggtcgccacgtccacaggatgcgtcgtgatgcacggcaccctataaagatgaaaacgggcccgggaacacgttgacgaagacccagggatgacgtagcatgggcgacactgcggtctgtgacgcttgcgctgcttagagcgctcgactaggccctactactggctggtcgacatttcttcaaccttttactcaaagcctcccccataggcaaacttgtgcaaaaatttgatctgcgtaaaaaatggaggaatttgctcagcatttactcaaaccgttggagctgtacaaaactaaaactataatgacatattgacagaaaaggggtaaaaatttagttttactcacgaccggtggagatgctctaacctgattacttatatgaatcaaagttctccagataaaacacttggacatccttaaaaacactcccctacaccccagcgaatggaatacacactgtatcgtgtactcgtttgaactccgtggttttcctgtccttccttacaacgataacgatgcagacgattgcgctttgttatctgggcattccacgtcagggtcaagctgacagctgttgaccgtcaacagctgctgcaattcgagtacaggcgtccccggcctattcgccacagtggtacttatgatgtttgcgaatcaacaagattcacgcggtctgaacataaatgagaatgtactgacttactacaagcttagctcaagaatacggtggaggtattcccgcaacgtgccacttgtcgcagtagatatcgctgtacactcatctaaatcaatatttttgcagaagtagcgtgcaaatcttgagagcttgttgtacttcctgtgcgaggtacattaaaatatacagccgggactagcccggggacgcctgtattatgctgagcagcaagttgtttaccaccgtatcggctccaataccgctgctaaaccataaacatcaccaacaatcactgttcactcaccccacggatacatccgagctttcggctgtgggaccacactcggtgaacgaggggtagagagagaacgggtctgtatgtgtcatttggttttcgttttcaaatggttgaggtcggcagtacctcgatagcagtgttgggggcatgggtgagttactgggtactgtagtaatagtagaaccataaagatacaggtaactaacgtactatagtactatgttctgcggattactaccaagccctgccggtagaagctgtaagtttgagtcttactaagacatacgaggaactctaattttctgcaccaacattgatttccctcaatcgccgtacctctagtattacatgtacagtatattaaaaaaaaataggtgaagtcgctcattggccttcgatttgcccagcaaagggtcaactggggttaaacaaatgaagtacgctagatacgttgtatagctgtatattgcgccaatggcgcagcgccaaattgttacttctgaagtgcattagcaaattatgtggacacgaccacgattcatggtataattacgttgtttgcggcgagtgaaattgccaaattaagcctgttatgctgttctatcactcactaaggcttaccttcgaattacagtagaggcaaactgctttgctcctgaaccatttcgaatttgcctgttgaagaaccatccgtggttctataaacgggcgcggaaagtggtctcttatctttgtgcagttcacaccagcgaatcgcagggcaatttgcaggctgtaatcgctggtgtcgttatgcgatttgcagcagctgttgacggtcaacagctgtcagcttgaccctgacgtggaatgcccagataacaaagcgcaatcgtctgcatcgttatcgttgtaaggaaggacaggaaaaccacggagttcaaacgagtacacgatgcgtgcaaatcttgagagcttgttgtacttcctgtgcgaggtacattaaaatatacagccgggactagcccggggacgcctgtattatgctgagcagcaagttgtttaccaccgtatcggctccaataccgctgctaaaccataaacatcaccaacaatcactgttcactcaccccacggatacatccgagctttcggctgtgggaccacactcggtgaacgaggggtagagagagaacgggtctgtatgtgtcatttggttttcgttttcaaatggttgaggtcggcagtacctcgatagcagtgttgggggcatgggtgagttactgggtactgtagtaatagtagaaccataaagatacaggtaactaacgtactatagtactatgttctgcggattactaccaagccctgccggtagaagctgtaagtttgagtcttactaagacatacgaggaactctaattttctgcaccaacattgatttccctcaatcgccgtacctctagtattacatgtacagtatattaaaaaaaaataggtgaagtcgctcattggccttcgatttgcccagcaaagggtcaactggggttaaacaaatgaagtacgctagatacgttgtatagctgtatattgcgccaatggcgcagcgccaaattgttacttctgaagtgcattagcaaattatgtggacacgaccacgattcatggtataattacgttgtttgcggcgagtgaaattgccaaattaagcctgttatgctgttctatcactcactaaggcttaccttcgaattacagtagaggcaaactgctttgctcctgaaccatttcgaatttgcctgttgaagaaccatccgtggttctataaacgggcgcggaaagtggtctcttatctttgtgcagttcacaccagcgaatcgcagggcaatttgcaggctgtaatcgctggtgtcgttatgcgatttgcagcagctgttgacggtcaacagctgtcagcttgaccctgacgtggaatgcccagataacaaagcgcaatcgtctgcatcgtcagcgttgtgaggaaggacaggaaaaccacggagttcaaacgagtacacgacaccacagcagcatcgccactggcgagctctcagcagacatccacccacacaccactccgtcattcgctctgcagtgcatagcaagccctccaagtctccccgctgaagatctcatcgaacgaacgccgagtatgcgccttacttccatccttgtgctggtgatcgccgccactttccataccaccggcactgcgctcacgttgaccaaggattccaaagccgggattgccaacggagattcgcccgctagtggcgacttcatcgacgcgaacagcgctcggctactgcgtcgggtcgaaaaagataaagtcgattacgagcaagacgaacagaggagctttggagccctcaaggatgcagtgaagaagctgaatcccgtcactgctgtgaagaaattttttaaacagagggctaaacggaagaaagtgatccagaccgcgagggatgccgataacaacttggcgtgggcgatgaaggaggtttataaggcggccaactgaaacaactgatcgcgtaccttaacgcgcatccaggcatccttacagctagtacagcagtcatactctggtagcgattactgtattgaaaggtcccttacacaaattcaagcaaaaaaagtgtttgctcttgtcatttccgctccaaaatgtacgtttcgcccgaatagtgcaattatcctgggaggacagctagaagagctgtatggacagcctcggatggcttcacttttgtgtaactaaccactaagggaggggactgcggctaactacaggcgtgcctgttgcttgaagtacctgtattgggatgtcgctagtccacttcttcgagcgcatcgtgctcgcattcggagtagctggaggttaagatccacattgttctttcaggatcgacgcccttaaccctttagctacgaggcttcgtacgggtccagtctgacctatacgacagctcataattgactacaattggctataatacattgtacgggctaggtagaagctcgcagagtcagccaacaggtccaagcggacctgtaccatagccacatgtgagcaaatcaacaagctggtgcgtaccgatataagactcgggcaggttctcttctattctacaactatcgagcggcaaaacacacgaaaaccaaaatccataagtacaggtttgttgaggggttgacgagagctgccattggtctaaatggtccgaaatcgcgttgtggttggttatggtacatgtctagggggacctacactgcaaagctcgtagctaaagggttaagtgccgatgccgagaagttcatgaaggttgtcttcaattgtgaggttgtaagaggctatagcatgaatgaatatgccgcgcaccctgtactgtacacaccaacgcacaaaaacaacttgcgctaaaactgtgctcctcgcgaccagacaatgctagaaacggtagtttcctacactgcaagataaaagctgttgatcataatcgtgctacaccatttctcaccctattttgctttctgccgacacttcacattgagtttgtattgcgtctgtttgcctgttggaagcgcgccttcacttacatcacaaattcaatcgagttttctcggcaacgtcttacccgcatgcgatgacacaaagaggcttcaggtaaggcgttgctcatggcgctggttagcgatgggtatgcctcgggcgcgtctcgaggagtcatgttttagcttactccttcctcaggtgcctgcgggagtgtggacaatggtagagcacctcttccccagtctggagcgacgtccggttgaccagttaacggtggcggtgaccaaggtaatggagagctgttggcgagtcggcgtggcgctctacttccacgatatatggaggtggcgtgtggcgttctttgacccgctcaacacagttacagaagactaccaccgggccttgttagtatccagactgcgccacgggtatgacactgtacatctacatctcggtcgaagtcttcagcgggatgttctcgagatggcggcccggacgatgcgtcgtgtgcccatatccgcgtgggagccgacgctcgacgcggccccaactggacgggcccgctaccttttgtttttcgatggcggctcgcgtggtaattcccgccctggcagtagtggtgctgccgtggtccgcatcggaaacggacagggtgatcatgagatctgttgggtcattagtatgtcctacgcggcggccagcacgaccaacaacgtggcggagaacatggggctactgacggggctcaaggcgtgcattcattttggctggaccccacttcatgtggtaggagacagcaacctcatcattcatcagcagaagacgcggactccgcctcgagctaagcacatacaaccgctatactggcaaagccggcggctggcagacaaactggcggtaacgacgtggcagcaccacttgcgtgctcacaacagaatggcggacgccctcgccaacatggcgatggattcacgccgcagttttcaaaagatacccactcgaatttgcggctccggctcgacgtgggacgacgtgtacaactacgcttccggcgacgtaggtcactggatggagaagaacagtgatgagaactcctcggagttcgtggacttcacccgttagtgtgtggaggtggctctggctccgtttcatagggcggtcggttagagacgaccaccgacaaggccataactgtcgttagccaaagaagttaagtgacatcaatgtacctcactgtgaaacgaaacgaaggcgttgctcatgggactgttgtcgctgcagctgaggagccaccagcgacacatgcaagtgactactgtagagagatcaaagcgaaacatgaactagcagatattgaaaatctataataatattcattattaaatcaataaatgcaatggctacttgcgcactacagcactacgcaccgtcgcaccagtagaaagcgtcgcttcaccgcgcagcggcggtggcaccaccagtagaagcggtatgccacgtccccctcttcccaacttgacagcaccgagcgtacccctcgccaccccagggctcgaaaactcggagccgttggcgcgcagtcgccgcgctgctggtgctggtgctggtgctggcactgctgctggtgctgctgcttggcgaggccagctactgctgcgggggcgggcccctcagctggctctgcagcgccgcgtgctgctgtgtctgctgcctgctgctctgatcttcgcaccttctccgtcttgggtaccttcttcatcatcttgtccttgcttcatgcgcgtgtcgtccagcgagggcgggtggaaaccgtgtaaacggccgccaggcgcagacttattgtcggccgtcctccccctcgctcttgccctccgcgcacttgatgccttcgccgcccttcgcgctcttggtctccccgctgtccaacacggacttggtgtctccgccgtccgtcgcgcccttggtgtttctgccgtccttcgtgcccttgatctccaagccgtgctccgtactcttggacagcccatcgtcctccgcgctcttgggatcacctcccccggtgcctgacgtcttcgcccttcgtgtcctgggtgacctgggctggctgcgagggcacgtgccctcacactcggcgaggcggtgagccggttgccggaggtgacgagccatccttgagatcgttctcgagcctgtgcaagactggcatggcatgcactcggggcctggaggggagggggcgtagcgaaggtctcggcgctgctactgcgctcgggggcgccgctgcgctcatggtcgccgcgatcatgaccacgcaaatgaaaatgcaagaagtgctaaaatgttgccgtttagaccaatcgtagaaattcagcatttctaccaatggtagatcgtgtcggcaggtgtaggcggctgtcagcaccgtcatggtatgaccggatacgttttggtcttctgggttgtgattcgacacaatttgtcagctgaagtttgtatgctcgaaaacgtattgaagtttgtatgctcgttgttgaagttgcgcgacctttgatatccaagatggcgtaacgtttgcgaacgacgcgcacaagcagcaccgtaccgacagaggcttctatcgcccgcgcacgctaggtattcgcagccatacgggttccattcaaaaagaacttgtcaggatatttaacatctcattgataacactggggtgtacccttcactacagtacagtacagtatacacacaccaacggacgacaagcaacaagggcatccatgaaaccatcgattgcattgaaaacattgtatgtatcctagtgagactagcttaacccttggactgactgacaccaaacaaacgctaacggatactgacgagaccagtcgaacgacaacggtgctgactcgggcggcaccttactccagcgagcgaagctgtcggtacgacttctgagacgacgtgccagccgtggctcttgccgatgcacctgcagacgcactcgccgtggcgctggccgacgcgccgaccgtcgcagcggcagcaccgttgctgttcgtcactgacgccgacgaagggttgttgccggcgttcgcgttcgcatccgcgttcccaccaccaggcacagcgttagtgtaggaagtgccggtgctggtaggggcgctgttgacgacggtcgggggagcattgtagataccggtcggcggagcgccgttcacagggtagccggcaggatagccggcaggataaccgacgccaggcaagcccacacccacgtgcgcgccgagaccacaccgacgccgacactcgcgaggccaggcacgcccacactgacggcggggcccacgccgtagccggcgccaggcacaccgagcaagcccaaggtctcagcgacctctgtctcggcacgcgcaccgcttgccacggctgcacccgcgaggcacagggccaagatcttgctgctgctgaggttgaggctgaacatggtatacttggttggttgattggttggttctaggggagacttggtccgatgaggtgggtgcgtgtgcgagtgctagctctggcggagatagatcgagcggcttgcttcgatgggtgacggtcaagcgagtagatttgagaatgaggaggtgacgaaggagtgaggcaggcaggcaagcaagcaagccggcagggcaagccgacaggctgacacagacggcaaattcacgtgaccgcattgactgatcccgttgctatgttaacccgctggccccatcggattaccagaggcgagcggagcttgtggggtcaccacggccgtggccagcatacagctgcaggtagagttgcgttgcattaaggtgatctgacaagccgtggctgtaaacatttcgtacgcagtgtgtgcgtacaggacggacgggtttgctcccagatccagcttgtgagaagatccaggggcacaggtgccgggcagcacgattttaccatgtggaggtagctcttgacctgcgttgacccaagagcgaccctcgctacctccatccggcacacttgtgatgtaaatccctaccctaccctctgcgataggttggggcattaaagaaaaaaacacttagatactacatgtgcaaacttacacgtatacgagcggaagttgaaccaaccaatatagctcaatgaggtccagcacgttggctttgaggctaatagtctggcgctcaagaggcgctggtgggtgatacaggtttcgttgatgttccatggtgggtctttgctgccatttcgaaattgtcgcacaccatgatcactctcgctgacctgcaaaaccttgagccgccgcatgaataggaggtgttcgtgtggatcgaggactctgagctggacgaactcaaggccttcaaggtccaatatgcgcatgagggcaagatactcgtggatatgaacgaggtctaccggatggggcgcagattcgagagcggctgcagcgtagtcaaactgctgaagcgcgagcacctgccgtttgtcctgtacgaccgagggcgctacgcgccggggagactctgcgtctacaaccccaagaagcgggacaaagctctggtgcacatccgcgagctcctagcaagagcggacatcgcgaaatggatccgagctgcttttcggcgttctcatcccgtcgaacgacttcgcttcaagctcggtagcgtccgcaccaagtcgatggtgtattgtttgaagcttggaacagtgcgccagcatttccgcacgctaccgttggagccacgcttcaatctcgaggatcacgggcatttctgcctttacaagtacggattcgttaccgatccggtgggagggaatgtcctgcatggcctggcatttgccatcggcaccacaacgttcgtgtgtgccagggagttgactcttcagacgccacaagtactgcaacatcttcagcaagccgaggttctcgtgagctatgggattggttcccatcgtttcgtgtatcgcgatccccctccgagcttggaagagcaccgggaatgcttcgtgttggacccgaaggacgaggagttcatctacgacgtcttcagggccctccattcttcgctgatgggcgaaccggaaacagaagccgctgagcctgcgtgaatcccagtcgagaccgccgttcaaggccctaacgcttccaacagccaagattcgttatctgaagctctaaaatcgcttcggctagcgcacattgccgcgcaggaagcttttgtccgtcagtaattgtcttaagtttatatgaagatgcatagcatgtaaatgtaattcgcctttacttgctggtagcgccgcacttcctcgccggttcgattgctgccgctgcagtacttgccaactagaccatgcagcatggtgctacgtccgcgatgtctttgcgaggtgaagccatgtcgttacggaggttcacttcaacttgggcaggcatgcaaatcacgccgggccagccagttggcaccttgattccgacccgcgcctagcaacgcgcgatggtccgacgcagggcacgctaggaatgcactgcaactcacattatgcgagaacaagcagggtcaaccaaagcattggtccgactcgcttcggcagtgcctccggcagttttttttttgctgcaactggggggggggggggctgccagtagcaactcactattttacatgtatttgctgagttcatcaatctgggtgccgcgggcagcctagagtgatacgaggaattgctgcgaggatttttttttgtagtacgcagtccccggtaaacatcgtagtgtcggctgtcggtggcgcctacagcgacatgttgccggacggcatgctcggtgtcgggtacgtcgcgatggggaagccagggtacgccatgccctcgccggggcccatgcagccctcgctgtcctcatcgtcgaagagcatgatctcgagcatcatcacttcctcgtgcgagaggttgcagatcggctccttgggctccatcatgttggtgacagcgtcgtactccatgggcacctgcgctgcgtccatgaagcgcttcttgcgctcgatcatacataaaaaccgaagaaatattggagttgtcttttgagggaggttgctgccaacgtcgatgatgttggctgtggctttgcaacaacgtcactaattctggtgtgaacaacatcttcaccatttgccactgccaatgcgaacaagcacgcacttcatcttgttgcactcagagcgtcaagcacggttaccattccgcagcagcacctcgctggagttcggaggagttacaacatcggtcacgctgagtgggtgcagttgaactgggctgttcgattgtttttcatcgtcctgccatgagctctgaccgtcgaccgtcgttgacacaacagactcgtataaagcaccacttctgccatagtgtcggacgtaccaagcgattggcattctttcgcaataaaatgcggctgaatgccatactcgttttaagtcctgctttccacactctcacgctgtatcaaaccagcagttacccagacccagcacatgcaaccttgagcagcagcaattccagccccctcccccccctccatgtaccagcaaagtcccgcgagcagagcatgaatcccctggagtttttgtgagcgtggatgccgtcgatggttcagtccatcgaatcaaacaataccgacagaccagttctcctttcgccccctgccgttcctcggcatggcctcaaacagcgctgtatggacgccacgatcgcgaaatgcaggatgtgacgaacaagccgttgcccgcgcgtactcgacctgcgacgaggctccaacttcaatcgcgcgccgctcgcccggcgcatcgcgctcgcaaagccgacgtgccggttcccgcagcatttttgcctgcttgaagtgtgcggggcgtccggacgtcttcggggggtcttgcagcatgctgcaagctgcaattcctccatgtcgacgcgggcgacgagcgcaatagcttctgaaggcttcggaccaatcagaagccgttgttttggcatgactactaataggtatatagtttgacaacatgatatatgaaaggtatataattatctaaagaggaacttatgtaagccgatatcctaaaaccaaggtgcatgttatgactacccggagagatcggatcgtcgggaagcggacctcaatgaatggtccccacagtcgtgatcgtcaaccgcgactaaccccagcgctgttaaagcagacaaccttgcttccaagccgactccgagaattggagcgctaccttcgggcgacaagcaacgacccgtgcacttgctcgcgaggtggattgctcgagtcaccaggccgcggctgctgcgctccaagcagaaaaactttcctgcaggatgtgcagtcagggcgcccgacgatgtggcggcctgcctgcaccagcgagtgcaccaaaagcgtccccaagcatgtgacaacctcacagctcgtctactgtacaagcgctggggacgcctcggcgtgtccttgcatccgtcctccgccctgcgttgccgtcaggaaacgcagtgaccaccggcactgcgctgcggttgactcgcccccactatgccctcaaatgccacgtcagtgggctggcacgctgtaccagtcctttcttagtattcaagcacactggccatgatggggtgagcgacgattcacctcgaacgaaacggctcgagacgaagcagcagccaggcaggcgaaccaccacacaggcgcgatctgttcctcacttccattctccctcccgcgagccgaagcctcctccttctccgtcccaccaccttcagtttatagcccacgatggccagcaaggagcagcagcagcccagcgccaaggccgagcagcgcgccaagctcgtgcgccgcaactcgcgcgtgacggtggaccagctcctgcgcgaggccttcgcccgcgtggacgtcgacatggacggcaaggtggacgcgctggacatccagcgcggcctgcgcgtggccggcgtcaagctgtcggcggacgacgtgggcgagctcatgaagcgcctggaccccaagaaccagggccagctcacgtacgaggacttccacgccgtgcacgaggagctcatcctgcagaccttccgctcgttcgacaaggagaacaagggctacctcgtggacgaggacctgcagaacggcctgcaggcgctgggcgtgaccgtcacgctgcaggaggccacccacatgatcaagcagctgcacccgcgcgacgcccactgcgtgcacgaggccgacttcaagcacctgtacctgctgctgcgctccaagatggcgtcccccacggcgctcgagaggttcctgtgggacccggatgtccgccagctctccaagaactggtggaaggccagcgtcgaggtgggcgagggcggtctgcgcgccccgttgccggccgacaaggacggccaggtcaagaaggtgtcgcccagcgtcaagttcttcggcggagcgctttccggcgtcattgaggcgctgatcctcacgccgctggacgtgaccaagacccgcatgcagctggacaagaccggccagtaccgcggcatgatcgactgcggcaagaagctggtcgcggccgagggccccaagggcctgttcaagggcttcacgccctggaccgtgcacgtcgtgctcaagaacggcacgcgcttctacttcaacgccatcttccgccgcatgctgtcggacaagaacggccaggtgagcggcgccaacgagttcgtcgctggcgcgcttgctggcgccaccgaggccgtgctgatcgtgacgccgttcgaggtaatcaagacgcgtctgcagggccagaacatcatcaagggcgagatccccaagtaccgcggccccgtgcacaccgccgtcactgtggtcaagcacgagggcccgcttgcgctgtggaagggtctggccccgacgatcggccgccagggtctgaaccaggcctgcagcttctggtccaacaactttatcaagaagcacgtgtggaagctccaggacggcgactcgctgccggcgtggaagagcggtctcacgggtatgatcggcgccatccccggcccgtgcatcaactgccccatggacgtggtcaagacgcgtctcatggcgcaggaggccgcggcgggcgcgggcggcaagtacaagggaatggtggacgccatggtcgtgatcgccaaggaggagggcgtcagcgcgctgtacaagggcctcgtgccgcgtctcgcgcgtctgtgcccgtcctacggtatccagtggctcgtcatggaccaggtcaccgagtacttctccaaaaactaagcgagcacgcgacgtcagtgatagatgcttatttcgtcgcctgcagtcggagctgctagcgtcctatattcataccacaagcaaaacactattctacctagcagctcgaagcagcagccaaatacaacccccacttgattatcatcatccccagcattcaaagtgcgtactgactcggcaaacgagcgcaataacgagataccgaggatttgtttaacaaaatctgatcacgctgaagatgcgtgtagccttacatatgagactgcctcgaacaaaatgatactaagccaccatttagagttacagtaaaagctctcacttccggtaacgaggtccgaccatctcctaatatttgccattttattataaagggaccacaatgaagtactgtacacgtaaaatatattttaaaagctcaactgcgaagcacgaattataatatcttctacactgacgtcttcgtcataagtagtgtcgttggaatcgccgcacctttcatctacaccgttaaaaacaattccagtatggcggaagcagttttcgatggccgacttatcctgcagctcttgccagatctccttgctccaccgcattgcttgcaactgatcgaccgcgtagggctccttcttcagcttcttcacgtccttgatcttttcgtacacccagagaatctgccttctcctgtacgcccgcttgaacagtgcaatgatgccggcgtccataggttgcaagtaggtagtagtattcgggggtaggaactccacgcgaatgtttgtacacaccagatcgccggtcttatgagaagacgcgctatctagcagcagcaagatatgacgccctgccgctcgcatgtcccgatccagattgtgtagccattctcggaatatcggtcctgtcatccaggccttcgcattagcccggtatgagaagccgaggctttctgcagagcgcttctcaaagcaatgaggctgcttggcgcgacccaggaacaacggcggtagtgcgtccgtgccgtcagcgttcaccgtgagagcaagcgtaatacgggtcttcttcttcttgactcctcgcgcccgcttcgtacaaatagaccgagctggggccattgcgtagcaaagccccgtctcgtccatattgtagatgtcctttgcagggtagcgatccgtgatttcttggagtcgttgacgaccttgagctacagcagcgggatcagcggatccagactcgctgggtcgattgcggtagcgaaggcgatgcctatgttcaaatgcagtgagccagccgtcggaaaaccccccatgcgtcgcacagctcacgctgaatgtcgatcgctttcatccttatcagctcgcgggacagacagacgttctgggcctccaccgcttgaatccacgcccacagtcgcgcctccagcgccgccgaggtcaccttcaggggcttgcggcggttgtcatcgccgtagtccttgctcatgatcaacgcagccttcttgagtatgtcggacacggtcgactgggctggtgcgcgcttgagtttgtagtgtgcttttgtccacgctgcgagcgctgcttgtgacatcgtggggcagtcggctgccttctgtatgaggcctcgcttctgatgtattttcatccaggcccccatggcattcttgtacttgtttggctcagtgaaaattatggtatgaagacctgctccgggcttgctgctcttgctctgtggcaatgactggtgtgcattagttcgcgccaaaactcccgccagggtttagtaaaaataaacctttccaaatagattacatcgtttaattcgggatattaatttataccagtaccggaagtgggcgcgcttactgtatcgagataatcgcgcttgaaaattagctgctatttttcgtatcaaagtgaagtttcaagaaagggcccgatttgtgatttgaaaacctgaactgtcactaaagcgaacgctccctcaacacctcactctcaaagaagatctacaccaccgccgacatgaaagcccaccgctcgacctccgagctgccatcgcagacctccagcggccccgagtcgtggcccgccggctcacaggcttccggcgctctcgcgtcacagtccgttggtgcctctgagccacccgcgtcccctccctgtcaacaccccccttctcccgagcagcatacgccgtacgcgcccgagcagcacgcttcggcagctcctgggcagcagcttgcgcgcacctccgatccgcagcaggaggagagtgcctccgagctgcacgaatcaccggcgtgcacgccttctcgaaccgatcggcagcgcaaccagagaaatcgaccccgcgtgacctccccgcacgttgcggcacatgccgccagcgacgtctcgtctgagagcgaggagcctgatgaaagcaatgatgatgaagattggagcacggccgagtcagctgaagaggatagagaggtgacgggggacagcgagggaatcgaagacgatgagcaagccgaggaggatataagtatcaatttgatcgaggttgatattcaccagaaggtgacaggccttatcagagctgataagtgtgagcgtcgctgccttcagggaaaggctcaagagctgcagtgtgacggggcacacagcacttcttaacagaggaagcaggagtatacaaactccaagtgaacagccgttcacgtgtccctggtctgaaggggacgacttgacttgaaaagcggtagatctaagactgaatgtatatataggttggtacagatttggcctgcatacaaatcctaagttccctatagtttgtgtcatacaacatgtatctgttggctctgaggctacttgggtcactatccaggggagtgaccgatgtagccatcccggaatagtgatagggtcactattttatgtaaccccgttacatcctcccccacttagattcgatcttatcgaccaatcagagcgaggtcacgccggcgactcacatttcactcgcaaagtcgaaatccattgacaacggcgcgagctctggcgcctcggctcccgggcctcacagagcaactggcgcatcgccgagcaagccgcagggtctccacgtcgaccggaagcatgcctccaaagcgcagtgcgcgcagtgcaaaagcaccttcgaaaccgcggaccgtagggccgaagaccagggcggccaaggccaaggacgagtcgtccgcgctgatggaggccacgaaggcggccgaggaggtggtgcgctctcatagtaccacgccggagagtggccgtcaggccggggctcggagcaagtctcctgacgccgcgcaagccaaggaggagagtcctcggggccataaaagcccggctcgcgactgggaagccgccgtctttgactgcacgatggtccagtactccggtgagagttcacccgacgacgagaacgtctcggagggcagcacgcacgctgccgaaggcacggagctggcggcaggcgacatgaccaacgcctcggccgacgcaaaggcctcgtcagagaaggaggcggaggacgccgagtccgactcaggcgacagcaagcagtcgcacgacgaagtcgccatggccgacgctggggtcgtggccgagaagtcgccgagcgacgcgggctccaagcccaaggaggtgctggcatccaagcatctgacgctgcctcaaggtcgtgagcgtgcccaagcgtcgaaagcggctgccgctgcgaaggccgccgaggccaaggcgaagaagcgttcagcttccaggtcgcctcgcggctccagctccaagctgttcatcgactcggagtctgaggacgaggagggtgccgtccacgagcccaaggagctctccaataacctcgacgagcagcagcagcattaccacgctgctagctcgggtgcgtataccaggcagccgactgccacgactgccatcgagtcttcttcaggcggggatgccacgtacccgcagggctacttcccacccgagcctggcactggtgcgccagcgctgttggagaagctctcggctcctcgtggccttatcggcgggtacaccttgaggggttcctatgagcgtgctcttgttgagaaagagccactctttcttggtgacgttgaagccgcccggtgtgtgctactagcaccacacaagctcacactgaaggagttcaccacgcttcgcaagaagccggaggacaagggtggactccatcctgtgtgggggttccactgggtcaagccgaatgacaacatgacctggagcgaggtggaagacctctcctggcgctacgtccagcgcaaagggtattccgaccaagcgttcaaagaactccgtgaggatcgcactctgtccgcaatcctggacgtgcgcgagctccgcatcgagttcgctcaactcgtgagcaagcgcaagctccactcgaagatgtacgagctgaagcaagaggcgagagccaaagctcgtgaagagcgtgggcgtggtgcgactacgtctgctaccgtgccccgggtaccggccaagaagccaaggactacttacgaagctgccgctgcttctcgtcccatatcgcaacagccttcgggcagtctgcctggagctgctcaacgggctcccacgagttatccgactcagggtaacccctccacttcacgagcagctggcgcttgccatggagccgccgctcccggacgactcgttccacgtggtagtggatctgcccattacgatcaaggagggctcgcagtctccatggccgtgtggattgtcgagccgacctgtcgtcttacgactcgctgcgaaaccagctcgctggtcttcgggccgagcttcatggccacgcgccgtatccggagcagcagcagccccgctcgtatcaggcccagtttggccagggctcgtacggggcccctgtgtatgctgccccgatgtacgccgcgccgtcttacgaccagcgcgcgtatcaggcgccttaccgcgacccgacgccgcgcttcaaggagctgcgctcttctccaccgggccactcaccgcttcctgcggagcagccagagccagagggtcatggtacctcttaagacgacccacgtaaaacgtcgggtgagtcgtcatcgacttgggcaagtctatggtgtacgccgcgccatgccggctgaggaccgtgaagggtccaatgaagcggtgcttcagcttgttgccctcgaccgagctaacagtgtttagcggtaggtttctagtatctaggagaactaaatccccaaccttaaacacgttcatgtttcctcttccatttcggtcagagtactccttctgtttatcttgggcttgcgtcatggtgtctcgcaccctgctgattatgttcagcctgtcttcggcaaacgaggacagttgcttccgcaaggtggctggactcacgtccgagacttgggaggaaaaggttttccgagcctctcccccacttaggaccgaagccccggtactgcctcgtaatgtgagcggcacctgagggtggcgcaacccgttcagggaaaagggcgtaaagcccgtcgatgcatgtaccgcattgttgagagtgcgaactcaaccatgggcaagcgatcagcccaagagcggggcatctccgcgcagatactgcggagcgtgtcttcgagcacgcgattgacgcgctccgtctggccatccgtctgcgggtggtccgccgtcgacatcgacagtcgtgtgccgagaaggcgaaacagcgtctgccagaacgtagcggtgaaccgcgggtctcgatcagagacaatggtctcgggcagaccgtggtgtcggaagacacagtccatgaacaggcgagcgacctcgtcgccagtgacggtgtcacgaactggagcaaagtggaccatcttgctcagacggcacacgaagacaacaacaccagtgttgccacggtcatcggccggaagtccgaagacaaagtcgagactcaccgacttccagcagtccgctgggacgggcaggctcagcaatggtgccgaggcgtgaccggcaggcttcacgcgctggcacgtctcgcacgtacggacgtaggtggcgacccacttgtacatgtgacgccaccaaaacatctgcgagacagactcgtacgtcttctcacggccgagataaccactggatggagcgtcgtgcgcctccatcaggatgtcgtacttgagatcctcgtcgttgggcacgacaatacggggaggatcctcgggctcgaccctatagtggagcaaaccgtcagcccactcatagcggtgcagccttgcacgttgtcggggcgtgagccactcggccttggcttccgagccagcggccaagaaccgcacaagaggtccgagactggcatcgtctcggtaccccagcctgatgcgatcatacagatccgtcgcgacccgactaatatgagcaagctcgtagtcgggtcggcgcgacagcgcgtcgtcaagcacgttcaacttgcccggcttgtactcgacacggaagttgtattccgcgaagaatgacagccaacgcgccatccgctgtgagagatgcggcgtgttgacggcagtccacaaggacgcgtggtctgtataaacgacaaagggcgtcgagcccaggaggtgcactcggaacttgacaagagcgtacttcatggcaagtagctccttgtcgtggactggatagttccgttcggctgccttgagctgcctggactggaacgagatgacccgttcgcggccttcatcgtcggccggcaatagcgcacagccaattgcgtagtcagacgcatcacagactacgctgaaaggcttcgtctcgtccggcaatgccaggactggcgcgcgctgtaagctcgctttgatgtcgttaaaagcatcttgatggcgacgctcccagcgccagtcgacagccttcttcaggagatccgacaagggccgtgccagctcggcgtagcctgcactatacttgtgcaggtagttggcgaggcccaaccactgtcgtaggtccttctgcgaccgaggtggcggccaagccgcgatggttttcaccttctccgggtccgcccggaccccggcgctgctgacgaagcagcccaggaccttgatctcctcagctgcgaacacacacttgtcgatgttggcgcacagcttgttcgcccacatgacttcgaacacacgtcgaaggtgctggagatgcacctccatggccgtctggcctgcctcggcacggctgtggacgaagatgtcgtcaaagtacgtctgtgtgaacgcacgcaaaggtcggaacagttgtgtgaccaagcgattgaacgttgccggggcgttagaaagcccctgaggcatgaccagccactcccagagcataccgctcggcgtgctcacagccgtgagtgggatgtcgctctcgcgcatcaggatctggtagtatccgtccaccaggtccagcgcgctatactgcgtgcagccggccatgttgttgagcaacacgtccttgcgcgggatcggtgtctgcgcaggcactgtcgcgctgttcagcttgttataagcatgaatcagacaccactttccgttcggtatgcaaacacagaaggtaggcgtcgagtgcggggacttcgactcccgcaccatgcctgccttcgccttggcggcaaagaaggcatcaatgacttcacactgctcccggggaagaggccattgcctcgtgacacagtacttcgtgcccggcacgagatcgatctcgtgcctgattcccctgtccggagggagattggacggtggatccttggacaccacgtcctcaaactccttcaccaaggggtacaccgggtcccgggggttcttaagaatctcagagcccatgcgcgacgcgcgctgtctctggaacccctccaggactgcctggtccatgaccgaggacgagttcaactcggccgacgtggactccggtcggaggagaaccaactctgcgatctccccggcctttagctcggccaagaagtccttcatggcgagcccctcaaggttcagcaactctgaaacctcgggcagagctgtaagctcgacagctcctgtcttgacccgacgaccggtcacgccgtcgaagatgtgataacactcttcggcggctggagccttggctggaggctcggagtcgctggcgactggcgtcgtcggccacacgactaggcccggcttacgacgtgaccctcgggtgtcttcgtctcgtggcgccgccttgacggcaccaccgatcttctcgatctcgtgcggaactacgttacccgccttgtccttgagcggaacttggttacccgccttgttcttgagcggaacttggttacccgccttgctgggtggaactatgttacccacctcgccgtgtggaacttggttacccacaccaggagcgcttccagcgactcccgcatcagttatagtctgagtgacctcctgtggaactatgttacccacatcggaagcgcctgcagtgccttcctcatcagttacggtctgagtgacctcgcgtggaacttggttacccacgccaacgccagcggcgccttctccagcagcccttgctgcctgcggtacttcgttacccgcgtgtggacctacgttacccacctggtaggtgctgtccggcacctccactctcaggccttgtccggcccggtcggagtcgtcgtcagtctcgacggaccccaagaactcattagacgctgctgcgccctggcggccctcgcgggcgccccaggtgctgccagaggtgggaacatgactcaccaaagctctgtcagagcgtgggggacggctggccccgatggccttgccgcgccagtcgatccaaggctcctgtttctccagccacggcatgccaaggatcaagtcgtacttgtccatgtctaggaccaagaacggctccgtgctgtcgaagtcctcgaacttgacagtgaggtccatgtggacccgaggtacttctaccaccgtaccatcggccagtcttaccgagatcagcccgttgcctttgctgcctcgtagcgcatcggcgtacttgtcgcgattgcgtgcgacagtctggcggcgcgcaaagttcttggacgccccagagtcgatcaagattctcaagggatgatcgtatcccggtacactcgcgtgcaccacaagcagcccaccgctgcccttctccgcttcgagagtacagagactctcaggggctaagtccccatggcgtgcgccacccgcacgcccctcatgaagacttagtgtttccccagtagggcgccccgtccctactggtgaccggcgttcccctggttcctggggtgcggcttctgccagcgacccctagagccaaagggcttcgaagagaacttcttcttcagtcctcccgcgggacaagcacgtttcatgtgcccaagcttgccacagccgtagcagcgaatgtcgctctgctcggccatgcccagatccatgggaaccggcccgttgatcgctccattgccggagttaccattaggcgcaccgccagaggcagggttgctctgtcataccgtggcgggggtacgagcctgcttgtggctgtactcctcctggagggcgatctgaatcgcctcgtccatagtgtttgcttgcacacggaacagttgcgtgcgggcaggaccgacacgcagaccgtccatgaacacggtcaccttgatgtgttaaggcagggggttccccaccaagaggcagtgagcactcgcatctcctggatgtactcatgcagctcgcgccttccttgtttgcaggcgaggaagcgcgaacgctggcggtacgagtagttcgccggaagaaacgcggctcgcagctgctcgcacagctgggaccatgatgcgaagcatccaggcgtcgtcgcttcgcgcgtatacgcccaactcttagcgcgaccactaaggttggagagcgcaaaggcgacacggagtcgctcgtccgagacgagagccgcgtccatcgcgagctcaacctctcgaacccagaagtgaaggttttctccttccttcccttcgaaggggtgaaccatcagccgcaggggcttcggttgcaccggcttcggcgcggccgcagtggcctgcagcccttgaacgtgggcgatgagctctcgctcgtaggtgtcgaacgcgttgatacgctcaacctgctcagccggcgtcgccgccgctaagctacgcagggcatctgtcccaaagatgcctgccatctcacgaacggactcgtactgcgagtcgttcagatggggaaactccgtaagatccatcttggctcactcgatgagaccacagaggattcaggtagtccaatctacccgcgtaggcgtaggattgactactattgctaccaagtgtgacggggtatacagcacttcttaacagaggaagcaggagtatacaaactccaagtgaacagccgttcacgtgtccctggtctgaaggggacgacttgacttgaaaagcggtagatctaagactgaatgtatatataggttggtacagatttggcctgcatacaaatcctaagttccctatagtttgtgtcatacaaaatatatctgttggctctgaggctacttgggtcactatccaggggagtggccgatgtagccatcgcggaatagtgacagggtcactattttatgtaaccccgttacatgcagtctctggttagttcaaaagtgtagcaatgtacgtcgtctagcccagctgatcaatcaatgtgatacttatgtgcatgctaatccaaaatgatatcaattgacaacatgtgtcactaatgtgaaacatcgcacgaaagtgaagttttaagactatttcaatgcgaatttgaagaaacgaagggtatcattgcgttggcattttgttacgaagcttaacgtaacttcgtggtagtgccgatacaaaatgtaagcaaatcgtagaactctgtatgcgggcgctgctcttaacaaactgctaggtagtagtcctcgtagccatcgcgctgacacgaaagctgtagggcttgattgagcttctgtctagtgctggcagcatggcaagccagagatggctgcgtgctcacctatcataattcccatttcttcgacgtgcaaacaacggtatatgctacaataaacacttcgcaatcaccaacatcctgtcattatttggttttgagggctttgtgccttggctttcgtatggcaatgaaatgctcatgtctcattgccgagtaagtatttggtctcatgggttttattaatggatctccccccaaattttcagcacaactttcacttgatggcagcctccctgcaacggatggaccgcgcgagcctgtttgcagacggttcgaccaccgccgctgcagtactcgccaacgagaccatgcaacaacgtcgtcgaggcatcgcgaggtgaagccatgtcgttacggaggttcacttcaacttgggcacatgcaaatcacgccgcgcctgccagttggcacctggatgcacgatggtccgatgcaggaatgaaatgcaactcgcattgcatgcagcaagcagggccaaccaaagcccgactcgtttcggcagtgccactatccacttggcagttttttattacgatcaccggaccacgagccggagcaaagtctgaagtatccgatacgccgagcgggctctaacgtgaatgagtcagcagcgccaatggccatgtagccggcaacaaacggaggagattgctagtagcaattcgctgttgtgcatgcatggccgactgcctgctgcgcggcagtctactgttgaaaatatccatgtcgttggcgcatccatccatgcccccaattcgtcgtgtttgctgccaatgtggtcaatttcatgataagtgccggatcttactgtgcaagcgcggcgatatttcgtgctgaggtggccagttcttcgctggtcagccccgaacaacctcgagtacgagcggcgcgacgcgacgacgggagaccgcgttgggtctgaccccttcctggcgagaatggacgtccggaaaaaatgcagtggcttgctggggaacgagcccgtcccagcagcagcagcagaactcgtcttgattcgctgcagaagcgatacagtaccggtacgaggaagcgctgcgaggagaggtcgtcggggtgtacggggaaccgagcgccaaatagatacggggatcagcctctgcgagagatgttgcatggttccaaccgagacaaaagaaactttccgcgagcttcctcgtgttatcactattaaggtagaacatgcaggcaaaaaatccctacgcagtccccggtaagcatcgtagcgccttggggtgtgtttctgtcggtcgcggtgctaatttactctatcaaacgaagaacaaaatggacggtgagttgtgtgttcgccgccggttagtgtcggctgtcggtggcgcctacagcgacatgttgccggacggcatgcccggtgccgggtacgtcgcgcccatgggcatgcccatggggaagccagggtacgccatgccctcgccggggctcatgcagccctcgctgtcctcatcgtcgaagagcatgacctcgagcatcatcacttcctcgtgcgagaggttgcagatcggctccttgggctccatcatgttggtgacagcgttgtactccatgggcacctgcgctgcgtccatgaagcgcttgttgcgctcgaccatttgttggcggatgaggcggcgcttctgctgcatgcgctgctggttcacgttggccttcttgcggtggaagtcgcagagcttgtgcaggtcgccgttgtccttgacggcgcggtggttgttgcagagcttgctcgggtacgagcagcgcacctccgtagggagcagcgcgacggcctgcttgctgtcggcagcggcagtcggagcggcggcggtgttgttggacgacatggttgtgaagaagtacttggctgtttgtttgggagttgctgtggtaaccaagctcgtagtgagactggttcgctcgtgcgtttgtttgtcaaatgcgcggtcggaggcgaattgaatagtgatcactcgctccagttgccccgctgcttattgttctgggcgctacgccggccgcggcgcttacctgccgtagacgggagtccgtagacgcaacttggtgccgagccggccacaccgcgaccaccgctactgcaccaagagcaataacgatgcatcgaccgatcctctgggccgcctcaaggccgaacgtactctactgaaccggttccgcgatttttaggcagtcaagttgtcctccggaacgattcttgctcgcccacggcagcctcgacgttagtcaccggggcgtgaatccggatcatttttaggggccagccgcagtgcggctccatgtcgggtcgagcggagtgctagctagcttcgcgttggcattgctcaatggtgcttgtaaagtcgccagcgcttctaaaaagaaggccaccgcgcgaagcggtgtaacggagactgtccccgcttgcccgattgtagctacccgcgctacaaggttgctggttggcacggcgggacgctcgctccttttcgcagacactgaaatacatggcatcgggcggtcctagtgagcttgtatgcaccaccaacgagtaggagctcgcaccggctcactctgctatgtatgaagggctcgacttgattatccagcaggcgatcgaatgtgccacaccaagaaagacttggccatgtggaagtggggaggatggcgagcaaaggggccctaatggcttccaaactgctgcgctgcttgggggcagctgaccgaactgtgtggatgctaatgctacagtccgccgccacgtcgagactaagatcgaggctcaaaagctgagcagaacacgcggggcctcacgcattaaacgcattaagtagcagccgtgggccatgccatttctccaccccgagttcccgacccaaatcaatggaaggcactctgagccacgcgccgagtttttttggcgcaatgcaacaacgggtgtaattgcctccattgcggcagaacaattggcaccgcagctccaactcgcgaccacaggaaggctgcagtgctgagcgagcaatcaggaagcccatgatggcgtcttttgggcacgagctccagcgctcgtcctgtcgtggtctttctgagtcattacttcttccatcaggtcctgaagagttcggactgcgcgagtgcgtgcgccggcttggaggcctagtcaagcggcaaccagccgcattaacacgagcgacagtcctatcgggctgcatgtccagcgaagcgcagggaaatcctcgagccgttttgtcgccccaatggtaaaaacgcatagagctctctattcgccgtcacttgttgtacttgtattcaagcggggttctccctcgttcacctatccaaaacatactccgacgtccgtctcgattgcatggttgccaaacctggtgacgatcaggttcaaccagatagccccgcgctacgaagcagcgacgcctagaggttcgtttgttcatgtagctccatccacttttgagcgaacctagttcgaaagggtcagctcgcacgcattgtgcatacctcgccatcgcttctagagcgaatctgtaactgttcgcacgaaccttcccccagcgtttaccagttcatctcaggtcgttccttcacacagcgaagccctcatcgagctgatgtagcagaacacagctcggtggctccatccgttacttctcctgccgtcgccatgaaaacaaaagcgtcaagtgaggcgacttcaacatgacgctgcgtctttaatctcgttcctagagtaccgcccttgtgaaggtccaaagcgtgtaccacaaacatgaacaccatgtggggtaatcctgatgcggaccaaacaatagcgatggatattctgcattcgcattgagagagctgctggacctcgtacttcaactacggatccgcatactcttctcggattggccaatttacttcaacttgtggtcgtcctgttgtgataccaagtccttcatagcaggagctcgtacatgaggattccactcggacaggacgcgaaacgagagtattgcgcgtgccctttcgtggtttgaatcatctagactgtgtagagcgcaccattgcatggacattggatatcgccagttgtaggtcgtgcctatctggtggaaaccaggcacagcccgactcgaatgtgttcggatgttccatgggcacatgacgatcactcgcttgctacgtgctgcaggtataccagaaagcgaggcagcttcaaccacggccaggcgatcgcactgaaaccgctggaggatacgcgccacgttaatggagacttgtcggtctgacttttgcttcgcaccattcaattcaccgtgtggtacccggcaaagctcacatagtgcagctcgcgcaggtaaacatccggcgtgcccatcgctgtatcggtcgagagttggctgcacgcgagccacatagggtttactagctagccgcgtctgcctatggcggcaacatgacgaagttcgtcagctgaatatttcgagacgcactgagactggagtgtagatagcctggcggcgggctatcccattcttcaatttttggtgtagtgcgctcgggtttgcacccgaggtgtggctttctttagacaaccagcttcccattcgcatcagtgtgccttccagcagtgtttcatcccatggcgtctatttattgctgcgagcatgatcccttgctgcttgcatccttcccatgccgcaagagccccatcgctttgtctccatattgcaaattcctgctcaaccaccagctcgaacagctacaacaatgtcggcatcgattcgcgcagctactgtgacggacccgtccatcttcgagatccttttcaagcaaaaggacggccttgacaacccgcaggaggaagccgcgtcgacttcaagcaaagccaaggaggaggaaccgcagcttttgctgcctgtgaagcagccgacgctgcttgccgacctccacttactgcagcaactcacacagcagctccaggctgcaacactgagcactgcaagcaacaatcacgacgacgatgatggtgtggcagcagcgaatgccgagacagagagcctagccactctgtactgccgccgcgcagcagcactgttggcttttgtcgactacgacgtcaccacgacggtgccccttgatattctagcctccggtccgtcgtcgagctctgtccgcgatgaggcgaaccagccagcaccgatgctggaggctgttaggcaagcgcttcaagacgctcaggctgcagcggcactttcctcaaacaatgcaacgatcgctgaagctcatttgctgtcggcgaattgctcgcgtagcttgggggagcttgcacacgctcgcgcatttgcagcactggcggcagcagcactaccgggaagctatgcgatcacgagtttggctgagcaactggacgtggaagctcgcgctgacactgcagagctcttgcccaagctgcgcctcacctcggcggcttttccgacatcaaatagtgtcagtatcgccggcgctgctgatgttgaacaggaggaagacgggaacaacaacgaccaacctgagcagcgtgttacgaaggcgtctgcagtggctccattgctgtcaattgaaaccccagcggagcagagctcgttctggcatcatgtggcgccgcactttcaaacactcgaagaagctgccaattctccctggctggaaaagctcgagcgactcatgcaccaaaacgttcaccaccgctgcgcgcagcctaacgaggtgcgtcaactggacgcggcacttcaggctgcatttgctgcgctagcgttattgctccaaagcagcgtcgcgtgctcagtgcttggactcgacatgagggacgacgcagccgccagaactctagagaagctcactcaaacggcttcgtcatcgccgcagacgctggtccagaatcgcacgacaaggaagtggattgtgtgcacgtgggctccaatcgttcgcctcgcgtcgtcgtcgccttctacatcgccacttactgacttgtcaaacgatgtgcttgtgatgctagcacgtttgcttcaggcatcggggagctggaggcgatgcactgccatggggcacagcttggcatacgccgaaatgggcttcgacctggcaaaaattctccgtgagagcggaactgaccctgctacttggtcacggctggagttgcagtgcgctgaagccttcgcaacagctttgctgcagcgaagctcaggtcaaaatgaggccttgaagacattccgagatgctctccaaggcgctcttcacgtcggggaccatgagtacgagcttcgagctcgtctgcatgtggctaaaacgcttcggctcatggaagagcccgagattgcgcacgctgagcttgaccagctactagtacgctgtcgagctctgaacgacgttcacatggaagcgatggccgagtacgagatgggtgagcacttcgttcagcaagaggacctggagactgcgcacgaacacttccgagcggcgcagacgctgtgcaaccgcacggccaactgtggggactcgtggcgccctcgatccattcagcaggcgatcgcgttttacgcgcgtctgcggctgacagctcgtcgcggagccatgcgctgcagcgtctcgactctgcttcgctcggtcgccgatgaccgagaggacgacagcgacgagtctgaagcggaagacgacagccacgatgtcctgaagcaagaggagcagcaggaggagacgcagcgccccaaggaacggcgccaggccttttatctcaagagatcaagcccagagccgcgctcattgatgagcacgatcatgagcacgacgggcgggaactcgctgagcggaccgaagcccaagcgcacgatgacctggcgcgagtccgtgttcaccacggcgtggccggctggcaacatggtggcttcgcaattctagacggtacattacagagtagaaagtaaatcgcacattttataaattctcttcactacgatcgaatgcatgcattgcgcgcgtcgtgcacaacattgttgccgttgaagttgcctttggtgtgggccacactgtgtccgcacgcgcttttgtccaatcatatcccttatccactgcgatccggagtctaactggctgaaatctgtccttaacacgagccactcggatcgtcggaaacccgctatcaggtttgacaggcagggggagcagctccccaaacgagcggctctgaaccacggagacacccagattcgccgccccgcagcagagcaagaacgacaggatggtcatgatgatgttcgtcaagaactcggcgcccgcgctcaagtgcgtaaccctacctgccacagcccccccccgccgtctcgtgcagacgtcggaccgcgcgccgctctatcactgcgtcacaagagcggatagagagggcgtcgtggaccgagtgcggggtggttatgttatggcgataattctctaacgttgcgccgaactttattgtattggcactttgtgcgcaggaccgtgggccagcaggcccgtggcatggccacggagaagcagattctgcagcgtatcacggccacgtccaacatcgccaagatcaccaagtcgatgaagatggtgtcggccgccaagatgcgcggcgctgagaaccgcatgaacgccggccgccccttcacggcgtggctggacaacgtcaagggcgcgcacgaccgcacgatcgagacggacggcgtggcccccgtggaggagctcgagggcgacaacgtgttcgtggtcgtctcgtcggaccgcggtctgtgcggcggcatcaactcgggcatcgctaagaccacgcgcaagcagatcgacggcgtgcaggaccactcgcagatcttcgtgatcggcgacaaggcccgcgcccagctgcgccgcgacctcggcgacaacatccgcggcaacgtgacggagacgtacgcgtcgccccccaacttcacggtggccagcgccatcgcggaggccgtcgtggccacggccgcgtccgactcagagaaggtgcacgtcgtgtacaacaagttcaagtcggccatctcgtacctgccgtccgtgcgctcgctcgccgtgcagcccgactcggacgccttcgacctgtacgagctcgagcccgacaacaaggacgagctgctggccgacctcaaggagttcgagatcgccacggccatcttccagggcatgatcgagaactcgacctccgaggagtcgtcgcgtatggccgccatggagaacgccaccacgaacgccgaggacctcatcggatcgctcacgctcgtctacaacaaggctcgccaggcccgcattaccacggagctgattgaaattatctcgggtgccgcctcgctcgacggttaagtggattcagccccgccaacgacagcggaacggacgaattaaatcctctcgcgcagtgtagctacagtaccagcgggcgcgagcttcatcaattcgaggaagtacgagcagcaacagcgtggtgtcgacggaaataaacagcaaaaccatctcctcgactgcgaaagttttcctagtctgtgcgtgcatgcaggtacatgtatgtcggctcagtgctgtgacggatgcagtcgcagcacagcttgaatatgagaccgcgtcgaacaaaaagatactaatcaaccaaagtacgaattgggatttaggtacctcgttggaaagaggggcgtcttagctatcttccctccacaacttctaacagttagattagccaaagatatgaccccgcgaaagcaaaattaagattttttttattggctaccctggtgtaaaattgtacagcggatcgctccaccaacattcaccctgcttgcttgggatacacgcactgttgctggctcttcaaggcaaccacaacgcaactcgccttcgctggtgcgacaggggcggaagatgggaacgcgctctgcgtgtcgaaatttctcagtgcgaaatggtgtggcgcacaccacgacattccagagatttagcggagttttcgagtgcttccattggccaaaatccttcgaccaacactcatacctccgctcgctggatttgaaccaatcacgacgccagaaaacccccatttcgcagcacaaatttttccgctggatatcgagcagtgccggcgttccgccggcctgtatgcgtcttctcttctagaagcaatgacgagggctgtttcggtgtttacggttcggcacttgtcctacggcgctcttgaggcggcacggaccgagctcatgtgcagctcacacctcaatttgccccgtgccagccacagctcacaccgaaggaagaccaacagacagacaacatcctatcagcatgacggacaagttcccagtggatctaacggagacctcgttctccgaggagctcaacgacatcagcagcagcggctcacccgccgctgtgcccgaggaactgcgctgccaatactcgagcaagcgctgcgagaaccagcgcacgcacaagaagagcggcgggctgcacaagttctgcgccatgcaccgcaagaaggccaaccgcaaccagatgcgcctcgaccaccggcgccgcgtcatgaagcagcagcagaaggagctccagcggcagcaacaggcccagcaattgcagcagattcaggcccagcagcagatgcagatgcagcggacacacagccacgcctcggtcgccgccatggcggcaggacagagcttccgctacagcaggacgcagcgcacccccgtcggcgccatgcgcagtccggtcggcgtcaagcccatgtcgccgcccaacatgacgatcagcatgagcatgcccgtgtacccggcgatggagataccgcctcagcagccacggccccagcagcagcagacgccgagcatcccgctgttcgaccagcacgacctggagatcttggaggcactgctgttcagcagcgacgaggagcagagcgacgcagccccggtcgtgcactgcagcacgccgcagttctttccgtcgccgtccgttgtgaacgtttgaaggcgcggcgccgctgcggctccccccgatgcagacccagatccgggcggcgcgaataccgagttcccgagcgtgtcggacgcacagttttcttagcgcatgccccgcgtgcgcaagttgatagatagtaagtatatagccctgataagtttaaaagtatttagccgaagataaagaagctggccaaaggaaaccagccgtagatgcagcgcagatgaagcagaagaatatcaataaacaccactgccgtctacagcaagccaaggtcgcaagtcttcgtctacagtgtatccatcgccggtacactgtaccacctcaagttatactgaatgttggagaatttgcagctctctacgatagagctgaccgcctaataatcgtttttaccacctcggagcaagattgacctgcagttctcctgccaccgtggtgctcttcgcgacttattaatacctggtggacagcacgcagccgcggctgcatcctcttgcttcccattttgtgctcacatcatgcgagacatcgaggatacaggatattcgtcaatgctgttgcagcctccatcttttctgaggctgacagacccataccttctcgacaaaaggagcaccaagaacgtcgcaaccatccatgcgcgacgatggtgaaacttgtggtagctgcacggagaaggaaaccaggtacaaacggcgaggaagccgcggactcactctgtcgcttcaacctggaaatctagctacgcacatgattcaggtggctgtttgtagtttctagaatcaaaacacggtgcaccacattccaattcccgatgttctgaacgatatagtgaacccaagtcaaatcgcggtcaggtgttcagcccacgacagtcctcgattcttggtggcctcgaggactcacgccgagccgcacttcccttccgtcgccgtggcgcgtgtcttagacgacacttcccgctcccagcaccaccacaaccctctggacaacattctcgtcgtcccacgcaactcttgcgctcgacgcaaagcgtttaacaccacccccacctacctaacctgcattattcccttaaacttgcaactttaagtgaacaactttaagccaaaatggagaactaccagaaggtggagaaggtgggcgagggcacctacggcatcgtgtacaaggcgcgggacctgactaccggccgcatcgtggcactcaagaagatccggctggagcccgacgaggagggcatcccgtccactgccatgcgcgagatctcgctgctcaaggagctgtcctcgcacccgaacgtcgtgtacctgtacgatgccgtgtaccagaagaacaagctctatctcgtcttcgagttcgtggagcaggacctcaagcgctgtcttgagaagctgccggccaggatggaggtgtaccaggtcaagagctacctgtaccagctattggctggcattgccttctgccacgccaaccgcgtgctgcatcgcgacctcaagccgcagaacctgctcattgaccagtacggcaacctcaagctcggagacttcggcctggcgagagagtacggcgtcccgttgagacgctacacgcacgaggtcgtgacattgtggtaccgagcacctgaggtgctgttgggtgccaagcactactccacgcccgtggactcgtggtccattggctgcatctttgctgagatggtcaacaagcagccgctgttcccgggcgactccgagattgacgagctgttcaggattttcagagtgctgggcacgccgaatgaggcgctctggcccggagtttcgacgttgccggactacaagacgtcgttcccgcagtggcgtccgcagccgctgtccaaggtcgtgccgcagctggaccgcgtcggtctcgacctgctctcggtgagtttgcagctcatgtgttgatttattgctgttgttaatgctaacttttgttggtgtgtttgcttgatgcagcgtcttttggtgtacgaccccagcagccgcatttcggcccgcgctgcgatgtcgcacccgtggtttgccgacctgcacccgcagtacgcctctttccgcaacaacggcaacggcaatggcacccagacgttcttctaggtctgggcagcgtgtggcgcgacaaccgacattgtataaaggaaaacaacaagaacaagaaaaagagacgaccgcgatggagattttggacagcaacaacaccgacagccaaatattcatcaagcagcgacaagacaagaagaaacgccggcagaatccaccgcaaggatgttgtttatctacggataaagtgagataaatttacaccaccgcagcaggagagcagtaggcgagttcgacggacttcgcttcaacttgctgctgggcatatcagggctcacccgagcctttttcacgtatgagtggcatagatttcgacggttccacacggaacaacgggggacgcagatagacagtgatagagctttgtctgctaactcgaccatggaactaaccaacaaacaaacaaagacaccacggagcgtcctccgtgacgccaccatttttgccatactacaataccgtagagttcctcattccataccatgaaatatccgactatcggacctatcggacctgtaccaaaaacatggtaccctacaaggatggactctaaaaacaaatatataagtttgtgtattatgttgtgggccacacaccgattacacttttgctcatttttattctagcgttggagggcagagtgccggaggcagcggcggtggcgccgagggactccggccgcaggaaggcagcggcaggaagcaggctccaggacgacggtgaagccgcaggacgacggcggcaggaaggactggcgaagcggcggcaggtcggcggagcggaggcaggtcggtggctggctggacggcgaggcggcaggcagcagtaggacggcgactggttggtggggcggtggcggggcggacggctgcccggagaaccttgatgacttgcccggcagggcggccggcaggctgcccgttgggtgagcgcctgcaagctgcggcgcgccctcccggcagccccgcggcccgcagaagcagctgccaccaccgccgccgccgtgaagaccccgcgagtgctagtgccttacctggaagggctggcggcatgctgctcggcccaagagctgggtgctgcccgctgcatgagcacgcagcacgtgcgggctgcacgatgccaaccacgctgcattgttatgagattattcgttatataataaacgtatatttaataaaactcctccactgttaatgtacatgcctagcggcttcccttccgcgctcattatacacaccatgcacgctcatacattgctacatcacgacgtcgagatggccattttcagtttcaaatactgcatatgtacctcaattatggtacaggtccgataaggtcggataaatgggatatatgcgtgtgatacgagtttatctaagaatttgtatagacatacacatattttgcaagtccctccgacccgatacgtccgacagcgtcggatatcggacttccctaaccctatcgcaatatattggccgaaactctgccatgacatccctatgattggcgcaaataaatacaaatgctgtaattggctgttaataggcatacaataaataagtaaggtcggataactcgtcatattcaaccatagttgcccatttcaatctagccaatcaccttcattcgcgccaagtcccgatctgcaacatacaaaaaccaagacaagagtttacctaacgtttcccgagtttcccaagtcaagaattgggtcaaagcttcatcgccgaaaaagatgaacggagctcctcataaacgccaccacgccggacgcgacgcgggtgtggacgtggtccgaacgccctcccacaagaaagcgcggacgctagtgacgccgcagacggcgacgcgcgtcgcctcaagtagcagaagccacagcagcagccacagtgcattccggcgacatgctgcgagcaatcccgagtccgaggagatcgaggaagaggagatggaggagattgaacacgtgcaagagatgcagagccaagaggctgaagaggaagaggaggcggccatgcccctcgtggtgttccagtgcagcacgtgtcgctccatcttcggagactcctacgcctttgtgtgctccactgaggatctgtggcttgtgacgctgagtcacgtgaccaatgtggcgctgtctccggaggtacagacggccaacacggggctggatgctggcagctcgttctacgagttgttgtgtcacaactgccaggctgttctcggccgcaagtatttaacgacgccagtggcgctggacggcatcagggacctcttcagcttctccacggaggcgatcacgtcgtacacgctgggggaccccatgcaacagagtgaagatgcagcagaccagcaaatgctgcaagctgcggcggcgtgtaatgacacgatgcagaagctcgcggcggatcggagcgagctggcgaggctgaaagacgagatggagaaggtcaaggggctcatggtgacggtggacgaccgattggcgcaccttgaaggagcggaaccggcagagtccgaggaggaagccgagcaggaacaggagcaagaggtgacacaacagggaagcaaagcataggcgttaactgtacgatgaaggcgtttagatatctttttctgcgttgattgtcttgttctagcgggggtgggtcgtatggagtctcggcaatcaaaagacacttgctcagtgggattcaccaccgcgcaggtgccggcatctcggccttcctcacacgtccaaagcttactgcgtagcctcaacctcagcctgagcctcgaaggccgcacgcgcagcctcaacgcccgtcggcggcttcgccttgcgcatctcaccgggtctacacaacaaaatacatcgaatgtcagcacaatgtacctccaacctcacatcttccaactgtctccgcaccggtccacgtattcaatcacagccatctcagcgccgtcgcccttgcggaagtcggccttcaggatgcgcgtgtagccgccctcacgcagcctacccagcaataacaagaacacctcctaattagcacctagaaccccgtaaaacacatctaaaaggcagcaatacgcacgcgtagcgggggcccacgacgtcgaagagcttggtcacggcctcgggcgtgcggaggatggactgcgcgcgcttgcgggcgggctcgtcgccctgcttggccatcgtgaccacctgctcagccacgcggcgcagctccttggccttgggcagcgtcgtgcggatgcgctcgtgctcgatgagctgcgtcaccatggtgctggaagagtgcaagggacgtcgttagctgacaccgcggatctagggcgagctgcgaggtgcaactggcatgcatcggtgcgcgagagagctgggaacacgtaccgcagcatggcctggcgatgggccgacgtgcggttgagcttgcggaaggcgacgcggtgcttcatcgtcctgcagtgtccaaggcttcctgtggtcacgaatgcgtcgaggtgctcccctcgagctgaaaaatgttgcacgaatgtattgtgtacatcccaccaaatacatgagtgttgcttgaaggtgttagtaccttcgtgcaacctcacttgttgaagttgtccgttatgcggctcttgaagaggcacacggtctcagtgctatattttccccctcgagctgcaagaggtcctagagcttccatctctgtcagcacgtatgggcaacgtacagcagcaagtgggcaagcgcatggtagtggggcgctacgaggtggaggccgtgcagtacctgggcgaaggaggctcgtccttcatcttcctggtcaaagatgtgcgcgcgccgccgactgctgcgcctctcgtgctcaagcgcctcgtggcgcacaacgagcagacggccgactggatcgcgagcgagattcgactgcatcaacggctgagccacccgcaggtggtgcagttcgtgtcctcgcagaccagcaaggccagaggtgacaagagcgaggtcttcatcctcatggagtactgccccggtgggcacctgcaggagaacatggtcaagatgggcaccaagcgcttcgcgcagcacgagctgctgcgcacattcagaagcctctgcgagtacgttgtgggacatgcatgaccattggataactacttacttactgagacctttgttccatgataggccggttgctatgctgcacgcgcataatccgccgattgcgcaccgcgatctcaagctcgagaacttcctgctggggaaggaaggcgtgtacaagttgtgtgacttcgggtcgtgtgtggaaggcccacagtcgctcgctaccaaggcggatcgcatgcgcgaatccgataatgtgtccaagcgcacgaccgccatgtatcgctcacccgagctggctgatgtggaaggaaccgccatgttcggctcgggtgaactgacggaggctgtggatgtctgggccatgggctgtgtgctctacagcatggcgtttttcaagtcgcccttcccgctcgaaggactgcgcaccgaccgctacacgatcccttcgaactcgccgtactcgccggacgtgcacgccatcattgcgcgcatgctcacggctgatgtggagaagcgtgccaccatcgagcacgtcatggagtgcatcgatgaggtcatttgcgggcgcccactaccccctctacctggtgcatcgaagaagaagaaggagaaggccaaggatgagcccccagcagcaaccaagaagaccgaggctcggaaggaaacagttgcgagcaaatcggctgatgctggagacttgctgggtatggacttcaaccccaccatctcggatagcaaacctccggccgctaaggctgcagcaccgagtgcgttcgatacaacttgggctgcatcgtcggaagggtttgcagacttcgcaagtttcccgtctccaacatcgttcggtcagactggaggctttggccagagcggaggcagcaatgcgttcgctccaggacctgccaaggtggatccgttcgcccttccaccggaccccgtcaagcagcaagctcctgcagctgcaagcgtcttcgacttcgacgctgctcctgcctcgtcgacccctgcaccaccacccgcgatggttcctcacgcggcagaagtggatccgtttgcagaaattgacgctccgcctccagctcttctgtacggcggcatgccgggacaacgcatggggcagcagcaaatgggacaacaacctcacatggggcacatggggcaaccacaaatgggcttccagcagccccagcaaggattccctggagggttcccgatgcagcagcaacagcaaatgcctcagcaaatgtggggtggcggcgccgccgcaaaccaaggctataacccttcgaatccattctaggcttgcatactaggaagctttggcgattccacttgcatatcttgaaacaacacccacaaagctccacaaactaagctaaacggttcgacatctctctccgttgcttttagtttatctgcattcatgacaaatctttcactttgtatcgcgtgggcgagtggcacgggtgcaagttgcactgcaaggcaccacgaccaaagcatcgcctacgctcacagcgactctaaatcaactcacggcgtggccgggacctcaatttcgatgtggtgaggagtgaccttggccgagtcgaactgcatgatccgctcgcgatgctcctcgctgcataccgcaggcgcacgcagctttgcagagtacacgcaggtgctgggctcttcaatgttgaagagctccatcggctcagggccacactcgagcttcaccgtcatggatcggttcgggccgttccagcacttctgtccattcgagaacttgatctcctcaacagcggtatcgactgaggccgaagcaccatcaacagagccctcgtcatcggacgcattgagcttctcaaactcctccatgtcgcccaacttggtgtggtcctgagtcgccttgccgaagaagcagatcttgtacttgtactggcccgcgttcgattccacacacttttcacgcagggcgaagtagacgtggtcgacgccgtagtccttctccagcaccttctggacctcggacagctctttctccttctcctccagctccttcttcgtgtcctcgtgctgcttacgcgtcaccagcgcttggcttcgctcgtagcgctcgctagccgccagctcctcgtagagcttgtcaataggacgcgtctccacctccggcagcgtcagatcctcctcctcctcctgttcctcctcggccgcagccggagcttcagtctccggctcggcctgtgtctcagcagcttcgactccttcagccgcctcggccgcagccttctccagcgcctccttcgcctcctgcgccttcttctcctctctctccttccgctcttcaatgagcttctcaatgcggcgcgtctccttctgcctctcctcgtccctgaccttaaaagcctcatcctgctcctccatcggcgtcttgggcagatcctcgtccccttcacgagccgccccccgctccttgcggatgatcgggatcagctcgtgcttggccgagacgccgttgcgtccgatctcgaggataatggacgctaattgctccttcgacagccccagcagccccaactgactcaagatctcctgcttgctggcctgcacgcggctctgcttctcctcctgctccagcctctcctcctcccccttgcgggcctccaactgctccgccatcacgcgcagcgacgcggccgaggcctcgacctccgccttcttctgctgctgctcgtcccagagcttctgcgcctccgcggccagcgccacgcggtccttgagcccggcctccacctgctcgatcaggtccttcttgtcggccttgaagctctgcatgcgagccgcgcagtccgacgcgcagcccgcgccgctcgcgtactcgtccgagccgtcgcagcagtcgcagacgccgtcgttcacgcgtgacgtcggcacgtccgcggcgaagaagcccgcgttggcgcagtggaacaccgcggccgtgtgcgagcaggccgacgtgccgggctcgtcgctgccgtccgcgcagtcgcaataattgtcattaatgcgcgagagctccaggcgctgctgcccgttgtcgcacgtgaactacatgcatatggatagtgtcgagaactggttagagaataattggcataaacgttctgagacgtgggaagtttaagctagtgttaaactttttagagaatagcaggcatgtgtgtacgtacgctggagacggcgctgagcttctgctgcagctcgggagagatcccgcgccagtccgaggcgcgcacgcacagagaaagcagcgccagcgacgtcgcgaggtgctggaaggccatggcgcaacaaggtgacgtgtcagcaagttcggttctggcgaaatgggtaacggactcggatttgcgcaacttatgggattttaaagcaacttaagcgtaaaataggcaacttcaaggtcttgttgacctctttgtcgtacttgatggtgttgaacggcaacagacggcaatgactatcaggcattgcaggcacttgaacccttaggctgcagcaacgagtgcctcttgctgctcgatctgttgctcgagcacagcagcttcctcgtcggtgagctcttggaacctgttctcgttctccttttccctctcggccgcctcagcctccaggatcttggccatcttggccgcgagagccgccgccttgtttgcgcgagggcgaccggcgtctaccggccgcgatgaaggccatagtactcggtcgaggaggcagcagcagcatcgacgacgtcgtggactccggcgactcaccagacgtgagcagtagtggggccttgggggcaagagggggcagccgcggctgcgattccgtcgaccacgctgtccctggagtcacggagatcgtcattgtagtaaactgttgcttgatgttgcttcgaacgaggtagaaatgaatatgaagcggtgtgagcgaagcgagcggcaaggtgtaaaatattgctagccagccagctacagccagttgccggtggcgtcgccagcattcgaagtctggcggcatgcaggggcactccacttcaacttcagtgtcgattgaagcggtaccatgtacctatgatgtatacattgtagacgaaaacagtgtcgagccgaagtacttccagtatccgcaggttgcgtcagcgttgtatgggtagctatcaccctcacgagtgctgatggggtaataagcgctcaacttgcgtcggtggagttggcaaagcttgtgtactatcttactgcgatatccgcggccggcgcggccggagggattcttcaaagagtggggacgtaatgagcaggggtgaccgatcaaatactgagtaagggtaactgaaccacctcacgttaacccatacaaacctgtttcatacagaaatcagggaacacaaagctgcattgctagattgggggctagacctgtgggtctggggtgaatgcgaaaatatgtctagagctagcactgcatccaagtttgggtagcgtcggacaagaatcgaggccgatagcgcgcgctgaagtggctccatagtaaagtgcacgggataagtgggccaggagcgtgcatgcgcagcacataagcagatcgtacgttttctcaatactacaccttttcaacttcaaaactgcaaattgtaagttcaaaacagcaaaaggtaagttcaaaactgcacgagcagagaccaggctagcttcgtacttttatacacagctcattggttggcacgcagcatagctagccaataggtaaattgtactctataatcgtatacgatgattgatatcattcagtttgtaatatacatttatagagtattgttgttttgatgttaccttttgctgttttgaacttacaatttgcagttttgaagttgaaaaggtgtaaacgtaagtgaagccggatggtatcctggagacgcctgaaatagttggctgcaactcaccaccacaagcactgttttgatatccaaagctatgtatagatttccaagacgtcactcgcgcctccagccctgccagttatttccctgagaaggtttattcgctgaaattagttgccaaagttcgcttctgcagattacaggtcatctgcttcattttgatttgctatttgtatcgacaggtagccgaaaaaagggaggcgattgaaaataatctcaatcgaagcataatgtccgctcgtcgatcttgatcacacgcctcaccccacaaagctataaatcgcacacgagtcaaacgagattctgcgctttacaatggtggttttcaagccgaaattggtgcagccgttcaaaagaaaacttatatcaaaattaagtggccgaagaccggtcgcattacccttagtgcgcgcaaaagttgtggtgggtagctacaccttttcaacttcaaaactgcaaattgtaagttcaaaacagcaaaaggtaacatcaaaacaacaatactctataaatgtatattacaaactgtatgatatctatcatcgtatacgattatagagtacaatttgcctattggctagctgtgctgcgtgccaaccaatgagctgtgtataaaagtacgaagctagcctggtctctgctcgtgcagttttgaacttaccttatgcagaattgaacttggaatgcagttttgaagttgaaaaggtgtagtagccgaggaatgcccgtcagaaatcttgggagggtttgacttcaacaaaacatggtacatgtactacacgaacctgcatatactccacactcggcgggctgtcttgtcgaggatactcgagcaggggtccttgttaatcgagaagctcttttatagcgacccgaatcagtgagctggacacggttttccaggctgaagtcatcccaaagtttcctctgttctcgttctcagctgcacgaagcttagtcatcttcgatttcttgaggtttggtacttagcatgtttacacatattaacccccttgctacacgatagctgagccggcttcgtcttgggccggttgcaggttcgacggggtccactgcgtcgtctctagaggcgaaaatgccgtgaaaggcagaggcatcgacaactccatcataaagttcgggttgacgagctgctccgcgtgggtaccaacagtacacgctgttgcacggatgaaaggggcttcgtggggaatcgggtcgatcgtggtcgggtcgaaagtgtcttgcatacttggacagaccttcttcgtcagcctcgactctactgcctccgcctcagcctcaccgagcttgcgcttcagtctcgcctcgcgctggcgctgatgtagacgcttctgactggcgttcgccttgcggcggtggaattcgcagagcccgtgaaggctgccgtcgacttgatggcgcggggattggtgcagatcttgcttcggtagccgcacatcatgaggagcggcacggtcgattgcagctcattgaagggggaggacatgctggacttgggggcttgctggctgtgccgcgcgactatgaattaaatactgtgtgccatgcattgtacggttcttcagccgcattgattttcccggggtgactcgccacgaggtccaggtaggataaccctatcgtgaccgatcgaaaagagaccttgtgacgggattccgtattctcaacgagctcagagatgcacagccacacacacacacgcacacacagaccttcatcaccggctttgacgacttcatgcggcgcttcacgctgcacaaaataatgccgacgataaagaattggctgtagctatatattgtttgccgtcgcagtagcgacgtcatttcagaggccgttgccgaggctatattgagctaactggccgtgctcaggtcccggacagagtgcggctgtatttctgtatttcggctcgtgtcgaggtggtcttcgagctgcgcgctgctgcaagcctcctgaatgttcccagccatggtgatttggattcaaatgatagccatcttcaacgagtcgcagtgcaaaccgctagcagcagtgtgatcttgaatcgcggtcacagcatggcgctgtctacccctgtggattgtgcaacggaacgtgaatgccacgccaaggatacagtgctgccgtcgattttgccatttgtaacaatgttccgtcgacctcccgtggatgaggtggtttaaagagcaacagatggttggcagctcgtagttagtgaggcggcgttgatgtgatttgggcgtacgatggcaacacttttgcatgaagctgttgcatttggcgtcatctccttgatattctggactacgtggcgaccggcatcctttggtagcccaggcaattgatgatccaaggtatttggctgttgcagttgaccatgcgtttaggcgcattacctgaatatcgcgacgactgcaccgcggaagttggcaaacatccacagtttttgactgtgatcgacgatttctagttgagtaaactggcacacgtctacatgcacgtgtacgcacgttgttttcaagtgatttgccacaatgaccctcaacacgaaacattatttgagttcgacttgtggggtttctctccgctgccaggtcctttctgctgcaattagcaaaatgatgctaatcatcgtcgtatgaccgagccgtagcgagcccgatgcctctaacgaatgctgttgtagcatcaaatttatcgctgtgcacctttcaggggaacggacctcaagtattccagtgtaaggaggccgacgacacggcgaaggacgagacggtgggcgcggcaaccacgctgtacgacggcgttgaagtagacggcagcgtgggacgtgaatccggctggcattgtggtcggcaggatctgctgcgcggtaccgagggatctactggatcttcgggcccgctggactccgcgagccccacgacggagctcactttgggttttgacggccagcgagcaggcccgaggaacgcgcgtttggcagcaagcgcaacaagcggtgaacggacgaacgacaggtggacgaacggcggtggacactaacgacgacctcggtggacggctgcggcgtgaacgacagcagagtggcgaacaggaagcacgtggcttccgagttcttcgacggctgcgacgagtagggcaggcgcgtgtgggcgtacgcccgagtggctagaagagcgactacggaactgagtcgtgcgcgttcgacgtagacgtgtatttgtagttagtcggtggttgacaccgcgctagttcatctaaataaagtaggtgttgctgccagtcgggcacgcaccggtgcagtgtcttacgcttggacactgtcggccatccggactttcgaccgcatcagcacggtcgcgaccaaaccccaagcgtgtggggcaccaaacacgttgcaccaggtcagtttaaactctatcttcagctgctatccggtttgacaaagatctgaaaaactgtcgtgtcattcggtgaaggtggtcccatgcagaccttggccggcctgaatttgagagagcacgattgggtaggataaagccatgcattcgacagtcccacggcctgcacaactcggtaaattactccgtccacatttcacgaagctattataccacgcttttgatattatcagtggctggcgtttgatatgcactcggtaaaagataacacatcctaatagacgtcctaagatgtcctattgtcctaaaaaatgcggtatattacttgcagtttgctcataaacggtaccaaaaattaggacaacacagctcgttttaggacgaacgggctggttaggagctgtcctaataggacagccacgattcacttaccgaaatctgtcctaataggacaacaacaattcacctaaatgaggatctgtcctattaggacacttagtcgagtaataaccgagagctgtcctactaggacacttaactgcctagaacgggcagttgtcctattaggacactttgttgactataactgggagctgtcctattaggacaaatggaattttttggcaactcgttagcaagggctctcgttgaagcaggactgcattatcagcgtctgaacaccgtactatcctacttaaagtccgcatagccagctgggatgcctggcactactggcggagcatgctgcggagccgtctggagtcccttcttgatgtcgtcaatgcgctggagatagcgggctgcttcttgcttggtgccttcaatgaaggtaagcaggctagggtgtgtacccactcgcgacgcgaagtcacgattgtacttttccagcggattgttggtgcggttaacgatgtcaacaccgcaccgcaccatttcatgaacgttccaggtcgtgacatcaaatcgctgcgtccaggtcttgaggaaatagttccaaaaagtattccattttgttttcgcgccggtctcgtcgacaatactcctcacgtacctcacaccctacaatgcagccatttatcagaataggtcagacacaaaaaattggtcaccccaaaaaatagtccacaccttttcagcgatttggtcctccgggataactgtgagagtgtcgagctttcctgggctgagagcgtccttgatttggtcttcgggtagccgcagctcaagcattttccgacggagggcctgtttccagtggaacaggcacccaacgaggttcgcagtcggaaattgctccagcacagcgttgataagggcggactcaaagtcacacgtgacatgttcgggctccagctggcggttgctcaggatcacgagctcgttgagaacccgccagtacgttttttgggacttgccttgcaccagtacatagcaaacaggcacgtagaggtcgacagaaggctcgaaagccatcacaatcagacactgactgaacggcttaggaaccaccgcaaatgttccgtcaatgaacagcgtgatcttcgggtaccgtagaattcgagccaagtcgggatgggccagtccgatcagacgttgcattccggtgcccgcggcggtggggtggacaacgctgaactgaagaaaggccctcgcatccatgtcactcacgcaccgaacagcttgggtcagaatggcttcaaagacatcaccgccagagcaatccttgcgcgtgtgcttgatgatagagacggccggctccgcagggatgatcttgagcgcaataccttctccgccgtagcgaagcttgagatcgtcgtacacctcttgccgcaggaccgccggtggggttgacatcttggtgatgctagagcgctggagctccactcttatctccttgcgcacgtccaccacttctggcttgggctcatccttacagctgtgcacactcttctcggcgacgacggctcctcctcggacaatcagtcttgccttgcatccctcacgaaacttcttgcagctgtagtagatcgtgtttgtttccgggcatgtgcgcttaacacagaatgaatacccgccgtggtccatgacaagaaggttgggctctcacacttaggctgcaaaaagtgaaattgctggcagcactgcactgtggggtctgacattcgacgagtggctaggatgagcccgtaattacgcgtaaataacgttgcgaacgctctaaaatacgcgtaccacacattgtggtcaccaataaaacgcgtaatattcataaaactaggttttaggacagctcgtaggacgtaattattatattctgttacgaaggattatacgagttttaggacatctcacggtaattttcgagagttttttaggacaattaggacactttaggaatcgttttaggacgtgttatccgacaccatgcactctttatcgatgcaagctaatgagctgtgtatgtggatcgtggttttgtctagacagaactacatcaacgttgactggaatgcaagctactgggtcatacgaggagtgagctactactatcgcccagcgacgttggagagctcatcgcacaccccttcggggggtcgacgtcggagagtagcaaagcgaggatgtccatatcggtctgtgtaaaaccagaggcgttgggctcttcggcatcgtcgagtttgaagggaatggggcccacaacaagagactgttgtctggtcaaacaagctttcttcttctggcgaacctcgatcgccccagtcggtcgacgcttccgtcgctcttcgcggtggcgctgatgaagacgctgctggcttgcgtttgctttgcgacggtggaactcgcagaggttgtggagagaaccgtcgattttcgtagcgcgcacgttggtacagaccttactgcggtagccgcactgcatcagcagcgacgtggatgtcgggattgcatcaaaggcagcgaacatggggaagaagtaagcggtgatggttgcaagtcgagaaatggtaccggcgggcgggtaacgattggatcagcgctctactgtacagctactgtagcttgagcttgaattggtgacgagatccgtctgtgggcagcgcgcggcaggattctgtccgtcctcgcgagagcgaccatcgctcatccaacttgtcctggatttgggcgtgcctggtgcctgcgcaaatcgtttcgtcctcgccatgtgaagcttatctgcgccatattattggcatgcgccctgcagcgtccagcgcggcacttgatgtgctggacgcttttggagtcaagtgtgtcaacggcagttcagtaggtcactcattactgcaaggatctatctgaccagagcatgcaagcaccagcggaaacccaacttgaaggttttcaagcagcctcagccagcgtgcacgaccgcaatatatgtaaatccatcggttgtagcctcattacatgtactgcagcgatgcatgcagccgcatctgcggatgagcatcagcgaccgctctcaggggcggcaagttgcagctggaattcagtactgtactgtatcatcaacgcgcgttcgaatccatcgcgccctgcaatcgctgcgataccgtacattcattccgcgttgatctggctggtagcattggtgtctatccaccagcttgagcgaatcttgagcacacacattcacatttgatcttttgggtgagttccatgatcagcattcctgcgtcattgaatgcagtgacaatggcgcgatataatataatacatgtatctagatatcttggagatgactagttctcggaacctgttcctgtttgctgcagacccgacatcgatggcgactcgccaaggcaactgcgagcgcgattgaccagcgaaagactggggcatgcgccactacgctagatgtagacgacattgatatcctagttttcccaggaggtaaatctaccctcgttcgggggtatatcaaaaatacatgcggtttaacgttaggtggtggaatgtatatatggtcacacgatgatgtagctcacgtcgtccacggacacgggcgagtttggcggacaagtggcggtcggctgcggtcgcgcatcctgtagtagcagctccagcagctccatatccacgggctcacaggccgtggagaaggtgaaatcttcagcgaagacgcctgaggggcatccatagtgtttgctggcgacgtcaagcggcgggttgaccgcatcgaacggaatgggatccatggagatggagccaactgggtcccgaacggccagacactctttcttcgctgggcgaccgtcctccgcttcagctcgtcgtcgcttgacccgttgctcgcgttgccgcttgtgcagccgctgctggttggcgttggccttgcggcggtggaactcgcagagcttgtgcagcgagccgtcgatcttcgtggcgcgcgctttggtgcagactttactgcgatagccgcactgcatgagcagcgacgtggccgtcgggagctcgtcgtagctggggaacatgcttgctgtgtttaaagcggtcgagggaggttggctgcaagttgattaatgaatgaccctgtgtcgggccgacagtcgggaagcggacggaatggaggaggggatctccactctccattcggtagttgaatcacgggccctgacgaccagagataagaccgtatgggcggcgccccccaggattctgtctgcccaccgttcgccgggcgatgggcaatcgcaggctgcttacaatactcgcatcaacaactggaaaacgtcgtgtcggctatgtgcgtgcgtgcagcacggcaatcaactgaatcggcaacgatggtccacttgacggccaagaaattgtcctcactggacacttccctatcttttcgagctcgcaggcgccgcaaaggcggcgctgaccccgccgcaactcgcgccgtagactgtacagtgtacgcgcgcagcttgggcgtcgccgagtcgctcatggcaagatcctaatcggtgtgctgcattgagtgggtggcggtacagaagcgatcttgctgacgcgctggtcgccaacggaatcgtgatcgtgggaatttttgggtgcgtctggccctgcccctgccagatgcaccccctggccgcgctcacgcaggaaagctgaagcgcaagaataagctggaggagttcgaaccgtaaagctccagcgacaacagcatcagctgctgcactttgaggataatactgtagctgctcggctcggcatcttgcaccaccgcatcgagccccgccgcgacgacctacaaatttgtttctcgtgcaccggtgcatgtccatggtgctacagtattggctaccatcgatggtctggagcgagctacatctttcagcgttgattgaacgcaggttagtaatatcagctgaatgcccgagggtgtcctcctgctgttgatagctttggcaacgcgcgttcttggaaacagcaaggccccttcaagctggcattccaaagcctttgtagtgcttgaatcaaaaagaccagctaggcatccggtggccctcgtggatagcggggtcgaatctctgctgcttatattcatggcccatgactatccgtgaccatagaaacagcagctctaccgactacgagaccgatccaatcgaatctactcgcgccggcgtcaccgacggtgaagtttatccttcacggcgggttcgcatccaggcgtcattgccccgtgagcgcatccctcggggggagtggcccaagagtccagtttgagaccctgccttttcggccgatcgctgacgccctaatgacgtcgttacaaagtcaatttttgaatcaaggcccactgctgcctgcgaagagcagcgtaatgaggtgtagctgaggctgaggctgaggctggcgcatgcactacagcgacgctgttgtcgcctcgcagttagctcgcgtcttagcctgctgccgtcgatcgacagcaacttttccaacccgagacttcgactcctaccgtagttgctgtggcagcagtacacgtattgtactcgcctgtcacgcgcgagtcgcgcgtgtacggttgagtcgcgcggcgcgactcaaccgtatccagcatgtcaagcctaatcagggggaaacttcgagaatccgtcagcgcagatgcgagcttcctgcgagtattgtacttctaacggcgagtcgccttgcgattgcgccacactcacacagaaatccggtcaaatgatactgatgcgggactgcaactgcagcagaggcccaagggatgcgccgctgactgtcaccgctcattcctcaatttgcggcaactaccccacacccacccactcaacaccagcatgctcgccctcttcgaggaggccccgacgtccacgtcactgctcatgcagtgcgggtaccgcagcaaagtctgcaccaatatgcgcgccaccaagatcgacggctcgctgcacaagctctgcgagttccatcgccgcaaggccaacgccaaccaacagcggctgcacaagcgccagcgcgaagagcgcgtcgcgcgccgaaagcccgaggctgccacgaaggcgaaggaggaccgcccgaccaagaagctctgcctcaacattgacatccccaccgacccgatcgcggccgatccaatcccctacgttgcggctgaagccccgctggaccagttctacccaagcgggttcttcgccggagagccaaccacccccacgagcctcgcgatcgtggacatggagctgctggagctgttgctgctcgacgcgcagccgcagccgctgtctctgttgcttccacccaactccccgacctccgtagacgaagacaactcgatcgttgtgcaagcaagatgtcctagatttatttacgtggcaacaatatacgtgtgtactgtgctctgttgatttacgcatacactgtgctttcgggtgtacattactctaacagaagagacttggttaccgaacagcggtcactgtacgtgtcgtctacatgtacgactcgcagactatcataggaatacgacccggtcgatggcgccccatctcattcccgttgtctccgcgaacgataaagctctcgccgataggcaccagggactaccccgtctaatgagagcgaccgtgacaataatagtgaccaaggagctgcacggcttgactttaccagcattcgccccaaccttcttgctaggatggtattcaatttttgccacgagatccggtcctggcgtcggcttgctacagctgcaaggattgcaagacaaccgtgcttgcactgcaagcacggttgtcttcccgattggggcacgaatcgagatatggcgtggtgggcctgtcgattcgtgcttgctggcaatcggggtccccccccggggtgatgcgtcaagagagtggggaatgtatccatgcgcggctggcgcagactacaatttttttcggtggagctgcgtggtagagctacaaaagcaccatcgaagcgttgctcatccgtctccttcgactggatttatcacatcgagcgcatcgcgagtcgccgatatatacggcggcatgatgcgccgagtcaaagagcaacaatttctcctggatatcctccatgttgaagcgagacgaacatgacgggcagtgaataatgcagacaccgtgatcaggctaaggtctcttcttcagcgtctccttccaggcaccaaccattgctcaattcactaccaaaccagcagacttactaaactgacccctcgccagcccgagatgaacttcttcgacgacgccgcagcctccacgccgctgctcatgcagtgcggctaccgcagcaaggtctgcaccaacccccgcgccaccaagctagacggaaccccgcacaaactctgcgagttccaccgccgcaaggctaatctgaaccagcagcgactgcacaagcgacagcgcgagaagcgagccgctcaagaactacgcgagtcggtcgagaaggacctcgaggctgcggaggatcactcggccaagagggctcacctgagtgtcgagccgatcgtgcactggtccaccgatgacacctgctactacggacttggcggatacgaacaccccacgcagcagacttccagtgttggcgagacgctattgcctcgtatggggtcccaggacatggacatcctggagctgctgctgatggacatgcagtcgctgcctcctcttgcaagcgcgccgcctgcctccgtggactatgaaaacttcgttgacgtgtgagcgtttagacagttggtgtgtgtacatataaaggaaatggtatcagcaagttgtgagatcaattaccacgatgaagactgcgataggacgatagggccacgccttggctaaaccaagttggtttgtcggtctcatgtccatgatgctctccgcgtactgtacaaagggaatcgtattcgagccggaagataaaacatgtaaagtatatcggcgccccatcactcgcgcgagccatttcaaatggcccattactgtatccccgctcaccgagcggtcaaccttgctagtcaggaatgatatttgcaagttgcattgtaacagctcaggtatcctcggtttcgttgcacgagcccaatgcgtgctgccaaaaatgaggtaagttaccgtactttggaaagtatctctcttcaatattgcagatgaagacccccaaggcagttcagctatgtcttatgccgatgcaatagccgcattacatttgctgtcacaggtgtcacttgctgttgccaagcaatgttacgaccgacagccatatttggcagcaagctgctaacggtgcttcgttgcttacggggcttttggccgagcgtacacttatctcccagcggctccttcccacatggcaatggccacactatggcgatcctcaatagaaaaatcctcacgcagcagttcgctgccatctctcgattcgtgcctcgtcacaaggcgcgtggaactcctaccttccgaactgctacactgtccgtccgtctcaactgcgtttttgctgtgcaaggcttgcgtaagaaccaggttttcgctgtgaaatttatgaaataactcgcagcttcattcattttaggcaagtctaccaacgaatgaatgacatactccgaactgcatccgatatccaacctcgctgttgcaggtgaatgagcatcaacctgagctcttaaaaactgtcctcgtatcccctacaaggtcagccgccatagagcaagctcctcttacttatcgtactcgccgctgccgtaaagaacagtgcgaacttcgcactgcgaagcccacgcaagtctcgcgttgcgggacgatataatatgtacatcccccttggcggaactgatgagctgagtttccctgacaagtctggatattgtcactccactgacaggccctgccttcaagatggtgcacaccgacaacggaaatattggagacttcgacaaatactcgccactcggctaggttgtcgacgaggtctccaccactattcaacttgcagccaaccatcacagccaccgtgctcaaactcacaagtatgaacgcctacttcgacgaagtccccacctccgcatcgctgctcatgcagtgcggataccgcagcaaggtctgcaccaacccgcgtgccaccaagatcgacggcacccctcacaagctctgcgagttccaccggcgcaaggcgaatttgaaccagcagcgactgcacaagcgtaagcgcgagaagcgcgcagctcagccggcgtttgagtttgacgaagaccacctgatcaagaaggagttcgagctagcgagtgagtatccaagcaagagagcgtgcctgagtgtggacccagttgtctaccattctgcccgctcgtctatcgatggctctatcaacctccgcgggtttcgacaagcggaaaccacaccgcaagtgtttggattgcagcggatgaggtccgaggacgttgataccctgcaatggctgctgattgatatgcagtcgctgcctcagctcgagtcgtttttgccaaacgtggcagtctgcgaggatgaggactccatcatcgtgtagtactgtaggaaaatgaaatccttcatgggcggttataccaggactttactttccatactgtgtctaaagcgatcgggcagatatgtacacccttcagcgtatatacttgtacatcgctcttgcttttgctgttcacctcgccacttgagctaaaaggcaggcttgagaaaacaattctctgaagtgcagtaaggctcacagcattccgggatgtcattactaccaagtcgtcggcaagttgccgacacttgtcgcgagtcagtttgggtggggaccggtcgccgccgtattgaggccgtgtctgtgcgggcgaggaggattagacggacaagagcagcaactactaagcagagtaatacatgcaaaacgttctgtcttgttgttcccaaagctaaatcacgactgacctcttcgctactcctacctctctcgatccttatcctgcgatccttgcgtatccgcgtatccgtgccgctcatctcccgctcaccctctctgatgacttgaaccgttcactcgggcgaccctagaagctgcccaccatgccatccgtccccgaaatccagccacgacgccacgaaaccctctttccctccgaggtatctcccagtagcagcttccgggtcttcagcttcacggcgacccggcccatgacccgccgctcctcgccctagtagcattgtagcctgtagaagcacgcttgtcctcgtgacacactcttcaaatgctacttgagctggacttgaacagtactgtacactgtacagtagacacaggacgagggacgaaatatgagcgtaggatacatgcttagagaatctttgagccgcccgaaaaaaatcgcgcttactttataatatatcggccgcctccagtagtgggccgctaccagcggatcggccccgctgacatcggacagagcggagcaaaaataacttttgtatcagcttcttcatgcagatgcttgaccaccgacatacaatacccaccgagatttgagtcctctcggatccaaactgcacgcccgtgctctggacgcttgaagcagcagcccgagatcaacggattcgtgcctcgagatcaacggattcgtgcctcgtcggcaatccgcagccattcactggcgggcgtcagtgacgactcgtcacggcgaactccattggggggggggggggccagcacagatagccgggcggcgagcttgacgttgtggcgccagtcggtcgactcgcacgcaaaaattgccgaagataccatcgaagctgtagacaaccctctgtgcctaggagtaagagtgtcaagttggtcctgtcagcgagtctctgctggcaggaacagagcgcactgcacgaccaaagtgaggcagatagcagcgtaatatggcgcggtaccgtacgagcttggtcactcaccgtgaccccttgaaggaagacagcgtcaagtgaaccgcattcatttccattttaccgcgaaggtctgagtcgatccacttcaaccagtcccggttgaacccatttttggcgagaccgcctggatactttaactcatccgctccagaagtggtcactcatccgctccggccacaaacagcaaaaaaatcactggtcaaagatacttcttcagggctggcgacccgttccagtcaagctcggatccacgcacgggtcatcgttcaatttgcggccaagcactacaactacgtattaaaccccaccagaatgaatgcctactttgacgaagtccccacctccgcgtcactgctcatgcagtgcggctaccgcagcaaggtctgcaccaacctccgcgccactaagattgacggaactctccataaactctgcgagttccaccgccgcaaggccaatctgaaccagcagcgactacacaagcggaagcgcgagaagcggtccgcccagcagctctgtgagccaatgaaggaggttgcgcctgctctcgatcccccgatcaagaagcctcgcctcggagtggagccgatcgtggacccgatcatgcactcgcccactgaaggctactgctactacggactcggcgctacgcagcacgcgtctcctgtgggcgcgagcgagttctcgttgcagcggatggggtcccaggacatggactttttggagctgctgctgctgctggacatgcagacactgcccccgctcgagtcgttcttgcccagcgcgagcagcgcggacggcaagagctcgatcgtcgtgtagacaaccgtggaattgcagtggaaaatcgtacaaatataatgcgctctccttgtcaagtcacaacgctctcccatcgtaaattcctgttcaagtcaccgttgctatttatttttctccctctctctcttctctaccagcagcgcctgcgtcttccactgcgacgtggtgaagcgatcctcatctcgagccgagattcccgaccatggagcaacgagctcctcggcctcccatttgcgctcgttgtatgcatctgtggacgcaactcgcgactcgattcgattgggcggattcttgaagttgtgtaatcgcattcgccccgatcgtcagcgtgtaccgtataaattatatcgcggagatgggcgacgtccacctctctgaaacactgactggcgcacttcgcccgtaatgacgtggctacgcctgcaggcagcaccgcaagccaaaccaaagccgccaacaaatcgttgccgccgacacagcgccgcctttagcctttaaccctttgcgggttatcgttgtattgaccagcactgttgaactcaactcaactcggtggcagccaatgcagtcgccacactgtggagtccacagtccacagtgtggactccgcagtctcctgcagtgaacctaaacggccagggggctccgctggccagcaagcagcccgccgggcgcgcgctgatgacttgacgccgaggacgcccggaggacctcaagacttgaggtcctcgagtcaagtcctggggccggacgatggaattttggcgtgctcggccggggcgcgttgacgcaaccttcccaggcgcgctaggcggcgccagcagagcccgggcggcgcgagcacaattcaaaataccgcgcgcagagccggccgcggcgtgggccacaccaagatctctgtggtcggcagcatactgggcgcaagttatttccggctcatcaccccgggggggtcatcaagcgtcagggtcatcgcgaaaagtctgacgaccgcgacggtcggcaaatgcctacacggtgcagagccgcggcgcataatagtactcggccgagctggagctagagtcgccgaagtgttgtcagtcattccggaaaaaacgctcgagccgctcggacgtcgccagccccacactcactcagactaagacgcgacacgtacgtgctcgagccatgacgcccgccgcccaagcccacgccccgctgccccgcgagctgcagtgcgcgtaccgcagcaagttctgcgacgcgccgcgcgccaccaagctggacggcacgctgcacaagctctgcgacttccaccggcgcaaggccaacgccaaccagcagcggctgcacaagcgcaagaagcgcatcctcgagcagcagcaagccgccgtcgccggccagacgcagacgcagacgcagacgcgggaccagacccagccgcgggaccagacccagccgcagacgccgcgcaagcgcgcgcgcacgagcgccgacagtccgcagagcgtcgtggtcggcaacttcgacctgctggagatgcgcatcctcgaggtgctgctcttcggcggctccaccgacaacgcgcgacaggtgccgccgcccgtatccatgacggccatgctcaaggacgagagtctcgtgtgccccgtgtcgcccaccacgccctcggcgctgacgctgcctgcgcccatgtccgtgcccgtgttcgacgacgcctggtcggtgacgctctagcccccccccccccgtgaattgaattgagggactactttattccgaacgccaactagtcgtacgtgcatgcatgcgatcaactactataccatactaaatacaaagtcgagtcgtaccagcaactaagtgagtgacaagcattgattcattgtgtgtgtgtgtatttggacttcattacttaaagtcatcacaaacaggtgtttctaggtcaaattggccttctatctatcggtctcgcgtgccactggagctccagtcagcaggctggttcatattcaacgtcgtgcagcttataaatgagcggtggtcttggttttggactcctgacagcggtagtagcggtttacgaggtgcgactcgtgccgagcagcgccaccagcagctcgatgtcttcggggttcaagtccacgggctcttcgagcggctcggggatgtccgggatttcaggcagcacgtcccacttgtcgagctccgtgtccgtgtcgagctccagaggaatgtcggtcttgaggaactcgtcgagtagctcaatggcctggaactcctcaccgttgaactgcatggctgcgagctggcgttcgagctgctcctggcgccgctgctcgcgcaggcgacgttgcatgtctcgctgggtcttgttcgccttgatgcgatgtgtctggcagagcttgtgcagcgtgccgttgcgcttgcgcgcgcgctcgttcgggcacggcttgctgcggtacgtgcagcggagctccatcgggatgacgccgttggtctggctcatgtctgtctgtactggttagtgttgctgctcggaggcaaatgttgttgtgccatgacaagtgcacatcctcgcggcgcgcgttgccgcgctccaagaggcagacacttgtgcatgttgggcaagtgctgcgtgaacactattgtgaggcacaccgaagagctcagtgacgaggcaagatactcgcgccgctaggattggtaggcgatcagatgacggatatcccttgtgaatccatctgcagtatccctcggtccatcttgggactaaaaatcgagagcccgctcgcggcaaatcgcgcctgggatcgctaaaaggcgagccgacctactcacacaggactcggattttcgggcgagcttcactcacggccttcactcactcaccgcaaacgctcatcgccttcaccaagtgagtcctccaatgcgaatgcaacgttgcaggagatcgccgtgacccgcgtgagtaacgcaatgcttgcttcagccgcagcaccctcgagtaagcacgaaccgtttcagctcgcggccagcttcacgctggtcatctccgcccgaggtgaccacttgcttgagctcacgcagtacttgccggggcggagcgctacatgcatctgtaggcgaggtctgcagcattggcagcgccgaaggcgccccttggagtagctcagtatgcaaactgcaagaggcagggtggctacacttctggcatttgatgttcagcgtatccatgtgccccgcttcaacttagcatatacaaatgtcaagtagtatcgtttcaaaactacatatcctgtccaagcgagcgcgcccacccataacgcctatccttaacggatcccactgcaacgttcgaggaagtcgacatgacatcattagcggatccgccgcggtccgcccagggatctcatggcgctggcaattttgcgctggattcgaggtggctacgcgcctctgcgcgcccaagagccacaacgcaaagcgctctctagctcacaggcaggtcggcaggcaaactctcgcgtgggcttccacgatccaaacagatgccattgtgacgagccactgctggctgtacactgtctttccagcggtattttgatcgggtcaacgccagcgccagcagtagcagcaccaagtggaaatagagcgctcacgcgctcaatatagcgtcacttatggccagcgtggagcgataagacttcagccccgtacgtagcacttcaacatgactaaatttggcgctcgcggtggctcggaatagctcctgacttcctggttgatcggcatgggaccgtgtcggccgcagagcgtgtccaaggtcaaaagccaactggcctctcagccagcaagctcgcacctcgactcgacgatgcaggatatggactcggacctgctcaacttcgacacgttcttcgcccccaacaatgacgagggggtcgagggtacgtgcacatagtaaataacaatatatttgtacgaattctaatcagagtgctttagatctgtgggacctagcggcggccacgggtgtaggtcaggacgacgatctgctcgatgctgcagagctggagcctctcagtccgatactcaaagaagaaccgaacgaagaagaacaggctcaggttcaggtgaagcagcctcctgataataagcacgggctcaagctcgacaccaacctgatcaacaactccaaggaagggtggctggcgcagtatgagaacgccaaggccaatggcacgcccacggccacgctaccagcacgctttgcgttactctccactacgtgtgtgtatgaaccggggttcacgacgtcaccgcgtggtaaacgcaggatcagtcaaacacttcagcaagcgtttgaggtgcaggatgaagatgaaggagaagacgaaagagaagatggacaagaagaaggaggagaagcagcggatggggacgatgaaccgttcatgctttcggatgacgacgactacaaccttcctgtgtttactgatgcggagcttaatgccatggtcgagtcaccgtccaaggtctcaacgacttcgacgacatctccagcgccttctccgtcgcgcggactcagcgacgcaatgctccatactgcggggcagagcgcccccgacgtgatcagcatgatcagctccatctacgacagctcgcagaacttcctcgtggctcagcagcaagcctttgagctctcgaacgcagccaacagcggcgcgagcagtagcaactccgtcgctgcaacgatactaggcacagcgaatccagcgctgttccccgctgcaccggttcttccgtaccctacagccactgctgcgcctccagccaccggatcaaacgatacagctgcgaccaacagcgctcaagatcaagctcaggttccgttcgactacttctcaccgtcaggctacgccgcagcagcgaaccagttcttggacagctacggacagcagattcagccattcttcctgaatccagacgcgctctcgcccgtgacgaaggcagcgctgttcccaggtcaacttggtcaacagatccaggcccaagcgagcaccaacgtgcagctcgctgcggccatggcgatggccaactcagcagctgcagtgaacacgatgaggaagatgaacgccagttacggcgtcccgatcgcccccatgcagcgtcgaacaggttccatgcccccgaccacgcagatcaagatcgcagcgccgatcaagccacgactcccagtccagcgcgcagcctccgcgacttccgttgtggcggctgccactgggaacaaggtcactcgtctagccatcacgccggacattgccgacttcaagctcgtccagatcttccaccagttctgcgatcccgtgacgaaggtgctgacgctgccgcgcttccagcagctgctgctccaccaccacgtgaaggaggaaagctccagtagctcaagtgactccaagcactcgaacgacgcgagttgctgtgggtcgaccccagcggcagcgaacgccaacgcagtggtgacgcccaatgcgcagacgctcttcaaagcgctggacatcaacaacgtcggtcatttggatctggaacgcttcatgcactcgttccagatctgcaaccgctgcacggaggccaagcgccgagcccaccaagctttatgcgctagtcaaggacagaccttcacgccaacagctctggaacgacagttgatggaggacgtcgcgcctgtggttgtgcgcgtagtgcccacacgcttcgaaggccacaaggtcaagagctgtgagcactaccagtggacctggtgcgagggcttcgagaagactggcaacgagaagtgccgcggcaccaaccgccacgacaaatgcccaaagtacctggccaactgcacactctggaagcacaagctgccgcccaagagccggaagcccaagatactgatcgagaacgtcgactcgcccaccaagaagctcaagcacttctcctaaatgaactttgaccatggacttgaacgtcacggaggactctacatctacctacctatctatcataaaagctatcaaatgcacgcgcgttggtcccaaacgctcaataccaatacgtcaacgttggtcaatagtcgcttaggtactgttccaagcggcgtgaagactcaagggccgcaggtatccgactgtggccaagccaagctcaatcggcagcggagataccatccatacgaatggggaactcgtgctattgctgctccaagcgcgagcgcacggttgaggaccttctggatggctcgctagaggacaaactactcggcaagcgcgacgatgacgcagaggccacaacggctgaggaggaggcgtggcgtcagcggcgtgagcagctcaaggacgaggcggagctgtcgctcgacctctcggatgataacgataaagggaacagcaatgctgcgaaaggaggcaaaccgagtggcagcaccagcgtcgaccatgggactttgatttgggatctgagtgagcggaacacggttcttgctgttcgcaaggagacgacggagttggtggaggacgaagaggacgacgaagtgttcggcagtgcgaaggaagacgcgaacggtgatgaagaagaagatcaggaccaagagagtaaggagcacgtggctgagagcgaagaatttgacgtggatcgactcacgcagctctctgcgaggtccgcggaggactcgtacgcgtccgtgaacgagtacttccgcggcgacgacacgcgggtcttccgggacacagagatcgaccgcgctacagtggcagacagcttcatgggcactacagtgacggacagcttcttggatgcgtcatcgacagcgaaccgcagcttccatgtcgacgatgacgacgaagtccagcagcagcagggtgaacagcagcagaaacaggagcaagacgacgagcaagttgacgacgagagcagccccgacaaacgtcgaagcagctctggtgcgtcgtcctcgtcacgccgtcggtcgtccaagaagaagtcgcgtagcaagaaatcctcgcgtaaatgagccccagaagcttaaggagaagcgataggacgacgaagctgttgttgctttaggaaaaaattaaatcacttgaccccccgacgccttgcctagtactagtcgtagtcgtagtcgtagtcgttgatcacacttcccagacggcttcggcgggttgctgtgtggagctcacgtatgtcggaggggtgtacttctggtgcgactgcagctctgacgcggacgggtggtggatgaggttgtaggagctccagcgcttccagctctcgtcttcgaccacgagcggctccttgttgtgcacgcttggatgtcgtcggggatggcagcagcgagccactacgctgctgtaggcttgacccatgccggcgaattgcttgagatggtatccgtcgccgcgccgcttcaagatcgatccttcaaaccgtgatgacgtaggtaccgtacatatttgacgaaacgtattgtatgaattcgatacatattcgaactgtgataatgtatttgtatcaacggtacacccagttgccgtgaaatgacaagtaaatgccaagcgacccagtctactgctggatggcagcgctcaggaacttctccatcgtctctcggatcttgtccaggcccgtggagctgatatcaaaccaggaagcgtccaggttcgtggtcgaagctcccgtttccgccatgtcctcgtccagtccgtcctggatgctctgcagcaccgttcgcaccgacagattgagcgcgccgccctcctgctcgctggggtcttgggccgcagcattggactgcagcatttcctcggcggacggctcgttctcgccctccagcagcgtctggaacctgatcacgacgctcttgacatcggcgcgggcgctgacagagacgctgtgacgaaccttcgtgcacttctcgtgcagctgggaagcttcggcagtcgcggcttcagtcgaagagctcgagcttctacgcgcgtgagccgcccacagctcctcgatcgaactggtgtgggggacatacgcgcagaccgtcttggcgacaatcgcgagctggttgtgcagcggatcgccctcgtagtcgccccagaactccatcggattggccgtattggcggcgttccacactccaggctcgccgaagtcgccggactgcttcatgtagtcgttgtacgagcgaataaagttgttctcgttgaagcccgggatcagtgcagtcgccacgcgaacggtgacgccgcgcgcgcgtcgcagtccagacacactcaaacccgcgccgtggacgcgagggtctagcaccaagcaggccatgaagtgttcccccacgtagcactccatgcgctgcaggaaactggtgcttatggcgcccgagttcccgtcgagaagcggggaacgactggcagcaccgaacagccagatccacagcgccagcatctggccagacgtagcgctctgcagttcactcagcgccgacaggaagttgagcggcgcaagaagctgcgcagtgtgacgcagcgtgttccacgccatatcgctgctgcccacatctactaactgacgcaggatggctgacggcgttgacgaggcctgcttctcttgctcgatcgctgcgcgtaagaaggattcgagacgagtggcctgcttcactgccatcgcgatggagcgccagcttgtaaccgagacttgagcgaaggcgctagcgtctccttcgacatcagcactgtcattctccaagaagacctcccggatcacacgctcacgcagcgatggcatcacgtgcagggcatcagcagtaagaacagcgttgtcgagcgcctcctccagtgacagactggtgataatcaactcgtgaagtagcagcgccgtctgctgcgtcatgcacacgcccgtgagcgtgaaggggttggtcggagcgctggaggtgcgtagcagttcctggcgtgctcgagcgtaagcgcccgacgtcggcgtgaccatgaagaccttagtgccggagtttgagcacggcagcgacgacagcgccgagagcacttcagcaacgtaaggcgacgccgcggcgccgttaccctccgccagtacaaatccatgtcgccactcatccagtgccacgtacgtcgttttcttcgcttcactatcgccagctccagtgttattgatcgccaacgtgaccgcgttcgaagcagctaaggaggtgcggcattggtggtcgtatttctgcgcaaggcgatccaacacctccgtccgcgcgcgagccgcagtcaacggcaagttgcccgacgccggacgcagaatctccatggcttcacggaacgcggcattgtccagcaagctccagggtgcgttcgtagcgaccaaagcggtcgtcagcttctcttcaaagctgcggatgttaccagcctcgcgcatgggcatcggcttcggcgcaggggcctgagtcggcgtcctcagagccggcgactgctgcttgatcggtaacgccttgatcgctgccttctcaggggtagccacgggcatggacttgaccacatggggggccactctggtcggctcaaccgccttggtcaaagtgtccgcaatggccacagtgcccaccttgacagccgcctccttcttattcgagacgagtcccgcagcacccgcgtacttggccttgacgtcctccggcgcttccggacacttggcggacaagtgcagcttcagacgtccgctgatctgcggcgagtcctcgtggcagtacaggcagcgcatcttcttgtgcttggtgccgggggacgccgggacgtcctcaaagtgctcgtaaactggtccgcgcttgcgacccgcggtctgtcgcaccttgaggacacttgtagttgaagttgccgataacgtggcttccggtgacgtggtcgcgtccgcattggtcggcgccgaggtggttattgttacagtagccggttccagctgctgcgcgcggaacatgtcctcccacgtcgggtgcttgatgcgcaggtgcgtcaagaggttcgtgtagcccgtgctggccgcctgcgtgtacacgttttggcacagacggcagaggtggcggttggcgccgccccccagaggcgcgcgcttcttgcggccgcgcttcttgggcgcgttcgggtcctcgggcgcgggctcaggcggcggcggcgcgtccgcgtcgagcacgggctcgaagaagaagctgcagacgttcacggagctcgccatggtggatttcgggcggttcgaattgtgtggagggaattattggaaaacgaaatctggaaagaaatgggactttggaccaatgaggaggggttatggtggattggggggttgtgattggatgtaatggtgttttttggtaaataaattgctttgcgtaagtaataatatgactattttatatttcttttttcgcatcaagtttattgtcaagtttattttcttgatcatgggggatgcaggtgtgctccgacggttttgttaatttgttgataactgttcacaatactacatgagtgacaagatctctaagctttttcaagcgcccgaagtagcctcgtcttcgattaccgaacactgatccggacgctgtgctatcgatccgttgcatcagaaccaaagtgctcaacaagatgcatgttctactcagctacggcgcataagatcaccaagactgatgactattgatagacagctacatcgatcccttcctggatgaaaggcggtattcctgcttttgtcgagctccgtcctcttcaaagcgtcgagcgatgtcgccgtattcacagctcaagtcgccgcccatgacgtcgacatccgagccaaacctcgccaaggaactggactggaaggccgagtacctcgacaaagatggcgttctgcggcgatcgagttgcgtgacacgccgcatgatccagcgcggcgcatcgatcaaaaacgcaatggacttgaccacggacgaccaagcgcacacgtcgattaaagcgcggactctggagaagcgcaatagccgtcgagccacgatgcaactggccgctgacgccgagcgcaagcgttcagccaacgcctcactcaagtaccagggcaagttcaacaaggaaaagtggctggaggacgtcaacctgcgcgcggccgagcgcgtggcccgtcagcaccagcagcatatgcaagaagtggcggagctcaccaacctcgtggacttgacggagaacaacacggccaagtcaccgtcacgaaccaacacttacgttgacgaggaggggaacctccgtcgtcgaatttccaccccacctgaagttcttcaagtaaaccaggagggctttgtcccagcgccagaaactccaccgccaccagcccccaccacagttgaagaaccacacgaatactgctaagtagaggccacagtgcattcttccatgagttcgttcattttgataaataaaactagcagcagtattcatcatccatcgtcggaaagagagatttaagatcttgacttcgagaaaatgttgctgaagatagcacaatacccgatgctggttctcttggatcatataaccaccctggctaaatgtgagcgctgacgacctcccctttccccatgttcttagccgatgcaaatgagtggggctgcatcggtgcgtcgcactttgtttcacgaccttccatactcaaaagctcgaggttttcaacgccacttggaccccttgcaatccgcaagatggagcagctacagcgttcgctatcggaaagactcgcttcaactccactggagacaaacgtggacttcattgaccaggacggagttattcgccgctcctgcactgtcaccaagccaatgctcatgcaaggcgcttccgtcgggaaactggagttcctctcaaccgagttggacgacgataaaccgcaaagttccgcagtgctcgagctctcgagcgtgcgcttatcacctttggccacgcgctcagtgtccgagtcggaaatgaaccgacccattcctcgcgaagagcgtgtgcgacgttgtacgcagttccagctccagcttcgcgaacggaagcacagcattctggtggagcaaaatacccgccacgaagagcgatcacaactctggcacgacgcctctgagctcgatccagacgtcgaaaccacaagtgagaacaccgtgcgaacgccgtctccgaggtcacaaacctatgtcgacgaagacggcaacgtgcgccgcaagagctccgccgcctctttcggtgcatcacgagatacttcagtatcaaatgaccaaggcacggcaaccgtggatggagataacgcgacaccgaagtctccaccttcacccatcgccctcgtatttggccaaggcaaagcatcgccaacacctccgcgaattagtgcgtcactggtgctggagttcgcgcagacaatcaacgacagctagaggaagcagcttaatccatttatcgataacacaaatcttcgtcttcgttatggtcgactaattttgaaaaaggggtattcttggccggttagcaagttgccaaacaccacgaaaccagcatattattatcgtgtcagtacttcatgagtgcaaatgcaggagatgccgctgatgtcgacgtcgaggccgacgccttataccacgtgcgactcatccatggctggccaccgctcggaaagtctccaccgctagataaactccttgtctcgtcattttacggccttcaactggagcttcgcggaaaagccagagacttgtacgactcgcggagttccatcacgttgttcaatgacggccaatccgtatcgaagaccggggagatcaggaaggcggccacagctccactgcatctcggccccccgtcaccagccatactagcgcctttggagactatcaccggtccattcgagttggtcgttctcaacaaaatgcctcctccagcatcctatacaagtaatgaggacatcttggcggccttgcaacaaatgggtcctgtgcaggcggagaacacgctgctggagatcaacggggaacgtatcgtgcttgactcgagctccactggggctgacgtgtatcgccgactgtggtgtgtgacttcacgtgcgtcgttggccacgccctatgagctcacgtttcggcgacacgacttggcccaagcatccgccaagatcgtgccgttcgcaagacggaaagacgtgcaagacgctcagctcgcccagcttgcaaagattgaagcgcaggaggccgcactgcccatcgacattcgccgtaagaaactgtttattttccagcaattggactttgagcgggagcattacctggtcgcgcacgtgagcggcccacttcagcagctacagaccagcataatgggcggcggtcagtggcaggcgtatgaatacggcaagacgatgtggtacttccacgcacctaccgcgcggttgtgtgcccagcacccgctccgctgtcatccagaagctcgagaactcatcgaaagggtccaacagcaagtccagcaggctgtgcggcgactgcagcggaagaccaggtcacgacaacgtcgaaagtgcttgatggctgtcatccaggccgagataaagcgacgagaggatgagaggcggaaggagcagcaacgacaggaagacgcggtgcgtcgggttcagcggcggattcgagggtatcagcgatggaagcggttcttggccatgattaaagcagcaaagcgacgacaacaggagcttcaaagagaacaacagagagcagaagaacggcaacgcgaagagcagcgagcggaggagaaccggcagatggagctgatgaagcaggagcgacagcgactacagcaggaacttaccgagctgcaagcagagatgcaacagcttcggctgctcaaagagaccaaattaccggtgcagacggaaacgcagaccagtgcccgacgagatgagagcgccattgagacgctgaggaaagaagagcagcagcgacttcagctgcgtcttgaaaatctcgaggtggagctgcagaagcggagggagataaagccatccaacgagtcagaaacgcaaaccagtagccgcagcagcagtggaaatgacgtcgagcagcaacgagcacgtcacagaattgaggagttggagctgcaactccgccatcgagacaccaaagaagtggtggagtcagaaacacagaccagcggtcgacgtggaggcagtttacgggatgaaggagtcgatacgggagacgatcttgaatggcagcggtacttgacgctgctgcgtgtcgcagtgaacaagaagaagaagacctccccaaagagaagccgacagacgcagactgacagcatcgacggcgaagacactatcttggcctcgtcaatgtttcgagcgccgcagcatgcggtatccttctcaccatcgtctcgtaaattcaccggagagtggaaaggttttccgtcgtggcagcggaccaacggcaacagtaacagcgggtatagcagcaacagcagcagcaccgcgagtctcatcacgctcaagtccagcctcggccaattcgacgagctcgacaccgtgtcacctccgacacgtacattcgaatccttcttcgcccccgacgtaatgatgccaccgcaggagcgtcctccaccacctctcgtcgagcagccgtggagacaggattccactttcttgccgctgaaatcgagtcgaaagatgctggaaatcacgccagtccaccagccactgcatgaaaaggaaagtccaattagacccatggggaacgcgtcatccttcgtaataactccagcatccagccccacaaatacaaccaagcttccatacatcactcggaggcggaagaataatgcgtcatagagacatagtttcccgtcgccatcaaaataaaagcacaagcaacacgtacgaaagaaatccaacggtctgcctgttatccatcacatgttctcacctgcccatggtcgggatgacaggtcttcctctactggtcatttgctccgtcggttagttgaatggaccatccgccacgtacgagtgtttggtcaagacagctactgcgatcgatctcgattcaattagttgttctgcttcagctggcgaacgtagttgctgagacgatgctgggccttgttggcaatctaaaacatagtaaatcggcacgagtgagtacactgaacagggcagtctgcacgtcgtacagctcaagcgaacgtacctcgatcgaggggttaatggcgagcagagcgcggatgtcctgcagggcgagacggtagcgctccagaccctcgtaggccagcgcgcgacgcagcagcgccttctggttcttctcgtcgtactcgagcacgtgcgtgcagtcgcggatcacgccggagaagttgctgagctgctggttgcaagccgcgcggttgttgtagcacgacagggccagggccgagccgggcttgtcgttgcaggcctcgatggcctcgccgtagagctcaatggccttctcgaaggcggcgctcttgaacgcgtcgttgccgcgctccttcagcagctcggcggggctcatgcccgagcgcttggactgctcggcgcgggcctgcagcggctcgatctccgtcaccaggcggttcaggtcggcgttgttgaagtccacgcgctggccggcgcgcagcgtggcgagcgcctcgtcgtacttcttcaggcccttgagcgccacaccgtggcggtggtaacctgcaacaccgtaccgtaaattttagtcagcttcaactcaaaattaaaaggaaatcgcttgacaactcgtggctcggagcgcgcggcacggtaggtaggtaccgccggaaaagggcccaagtgaatgagtcatccatcgtctgataacgccacgtacccttgacgaactgcgggttcaggcggatgcactcggcggcatcgtccgcggcctcctggaacttgccccagccagcgtacgcggcactgtgtgcatgtaaagaacagtgacgtcagtgttaagacgaaagagttgacgggagagagagagaacaagaagacagcccgggggaccattcttattgcgtgatcactccccctgctattggggctgttaattgagtggacgcacgcacgcacctgcggttggagaagtagacgtggttggtggcgtcgatctccacggcctccgtgtacttggccacggcggtcgggtagtcctgcttcttgaaggcctcgttgccctcgctgttaagaggaggagacgcagagttaattaggcggagaagggggtggagcggagggagaacgaggccacgcacttcttcttggcgtcggcggcggcgttgaccatggtgttcgctggctggtttggagtgtgtgtgtgtgtggctgggatctgtacccttgcgtaccctcgtacccgacctaatttaggttttatagcttcttagtttaggtttttcatgactttccgtcagcttttggctcgaaatgacggaaagtcatgaaaaactaatttaggcttgtaggtggccacctagagcggggtacacatcgggatacactatgtgtgtaaaccacattgtattaggtacactccgtgtgggaaccacattgtattagggacatttcaaactttgggtggtgcaccttaaaaatggtgtaccgtttctaaggtaccgatcttttagccagaaaaaccaggttatgcaaatcggagccgagcgccgctcctcgtcaaattcggagatgttgagatgttgtgcccttcaggcacgaatcgtcgaaattgagaagcgcgtcggtcacggcaattcgctctgtactgtactgactgataagcactgctgccgtagttggtgtacgcgcatcatacagaaagaatccgtgcctagtggtaacgaattagtacactggtagtagtgtaattcttgttggaacatccagccattgaccacactattcgtgttatttatagtaaacacacgaaatgaacacctccatcaagtacacgcttcgaacctcctctgtatttcgttccaacaatgtcccgtacattatgtacacctgagaatgcgatgcgctcattgcagtaggtgtgatgtacaggcagctgtaggtcgctcgaggcaaattaaaaagtgatattcgtgactaccgtagacagctaatcgctcgtgtccacctggagcaaaatgcacattgactacaacgtcccgtaaaccgtcgtcccgaaatccgtctagtaaactacagcaccctaagttataaattaccgtttccgtaattgcaccccagtgacagacgtgtgccaagaactgcccgcgtgtggcctcaacgcattcaccgtgacaactttcgtgcttgcagcgcaaagccaggtgatgtaccgccgatgtactgtactacgtgtattaatattatagtgtacgtgtaatgcgcctaccttggctcactactacggcttacacgtatgcgcacgtgtatgaggaagcgtaggtttcttttacttgagttaagtatactcgagatccacgagtatactttaaacaagataaagactccaagtagcgggttttggtaaaagatgagaactgctatttttgtttatgtttctgacttcctctaaatgtaatattctaagataggaatctgccaacggctggttggcagaattccaatgctatgcatgtcgctcattggctaagagatgctgctctcagccaataggaatcctaagtctctatggaccacccgtcgtggtgatcctaaatgtatgtagcctttggtgtgtctacaccaaggtccagaaagtctttcaaacctctaacagacatcgcatctgttagagtaacaagtgactgtagtcacttgtgcgtgtaaccccgttacgccatccccccgtcaaccaccattgaccgcttggtcaatgtgtgacgtcgaagagagcgtgcttgttccgtaacgagcacgacgaagttgaagacccctggcgcagcagcggagaacctctctgctgctgagtagcatgcgcgacaacgtgcgaagcgcgtcgctgccgcgggggcaagtacctacgtctgccctcgaagtgtcttcgggcgctgctgttaacagcagcgctcgcattacgttccagtatgtagcgcatggtgggcttcgtatgccctcaccatgtccgggacgtcttcgagcaagacgttccgcggctcccatgtatcttggttgggagggaatcctctccaacggatacgaaaacgaaccggttgcctgttcgttctcgggatactgtgaccaacaatccgctcaactatccatcgagttgagccgtgtgcgtcacgaattggcggtggtggtggtgggaacacgccccgtgtgtggtcaacttggtgttgaccctgatctcgcgtctccccacgaccgagttccggtcgtggagtagttccagagcgctgggttcggcgctctgaagcatcatcaggttgcgacggcctcccaggctgcctcgatcgttccggccgagctggaccattagctggacccgctgctccagcgcgaagtcgcgctggagaggatgacggcttccgccgagtcttctgtggttcagccgagctaggtagctcgtgctgcaagtatggcttcagccgtccgacgtagaacgtcggatggaggcgcatactagacggtatgtccagtgtgtaggcgttcgttcataacgtccgcaaagaacaagaccgctggcgctgtctggcgttcgaccaagccattctcgagatcttgacggaggtccacatcagcccttttggtgtcgtagacaaaggtgactcggacccgctgacggccggccggaccattcatgacctctccttccccgtcggccgctccatcaacgatcacactgattccgcgagtatgtgtgctcctacattcgagacgtgtgatgcaatcgcgacggaaattctcctccggcaacacgctcaccccagcgcggaggttaaactccaggctggcgacgtcgcctccgctttccgaaacacctgtacgcggagcgactgcgcgtaccttttcggtgggcggctcgagcccgataatgcgctggccatcggtctggcggcagcgttcggctggtctggctcccccgccacgtatggaatcgtcggcggtgccattgccttcatacacggcgtgtcgtccaacctgttccagccgcgaggccttttcaactactactgggtcgacgaccacatcaatgttgctgccgatgtcggttccaactgcgcggacgcttacatctccttacggaacgccatgatcacggtcctcggggatggggcaattaacgagggccaatttaccccctggagcacgcgttagaaggctcttaggctcattttcgacactgtcgcccagaccgtctccatgccacagtccaagattgataaggcccaagcctgtgtagcagcggcttatgtggcggattccctcagccgctccgactaccgctcgctgctgggccgccttcgccatgtggcgatatgcgtgcgttccgcccggcccttccttcagtggcttcgtgctcaagaacgccatcttcaccgctggcaccagatccctgtcgtaaccgagctgaagcacgacctcgtgtggtgggctcaaatcctttgttcgcccctgctcaatggcgtaccgatggcccacggtcggatctaacgcctgacatcgttgtggaaatggatgcctccgatagcggtctatgcgtgctggtacccgcgtcacaggaggttctttgctaccctttccgacaagaggaagccgaccttaatcgagcgaccaaagtgcagctgtggcgaggcaaatttgcaagctcccgcaagtgccatctccaacgttgcccggatatactctcgatgaagtgaccggactcaagctccccattccggaagacgctaccgctgatctctccggaagtaattttactttcacgacaagtgtggctgggacgcggtgacagaagaagattgacagtcattgtttgtatccagattgtgcactccggacaattgagctgctacgagtgatgacgcgctgcgaaggacgactagttggcatgcaccagagtgctcatgtgtgtgatggatgcccccgaaggcatgtgcgtggttgctgttgccgaccgagcgtgtatcgaggccaagcaacgacccagaggcaccgggatgagcagtgtttcggatggacggctggaattctgaatttggatcgagatggagagctggtttggatccttgaatctgcgagggaaaaatccagtggccacccatcaagaaaggttccaaactctaagtatagtctggccaagatgttaacgaccgaccagcgcgaccgaccagcgcgaccgaccagcgcgaccgaccagcgcgaccgaccaagatctgttatgcacgaggggtcgcctgattccttgcgtgtctccggatgttcaagatgatcacggcacccggacccatagtgaaaccaagataaaagtgaagcctgcatgcggaaagatagctagtagagatcgtctagcactaaaatcaacagagagttcgttttgccttgtgagtgacaagtcggccggccaagcctcaggaagtcattccccgggcccggcgacgcgtttcttgcggataaggtcacctcgggcacgcgtacgcccgttgtgcgagtctccactacgacctagagatctaattgatggggaccacggcgacgcgcgctaaggagtgatccgccatttcatattccagttggcgaaccgaacggtaacccatttcatattattaacttgcggtttgggaggttgttagtagtcaccccttgaacttgattgagagactgctgtgtggtaggattgtatacctgtgtgtgaatcggttagtcttccggaacgaattctagtgttcggctccgggatattgatttgagtaagccagtgagtttggagctgaccagggttctgaactacgctttgttgactggaccgaagacccaccgctcaagggtccgaaagaattagagcggctgtatatcgtgtataactctctgtgtgtattgattggtgtttggggacgactccaccaatagtctgaccccccagccgtactgactccgtttggaaacgaacgtgggcgattgtaatattctgtatctgattgatattgtgaaagcaactcaggtggtgaactccggacttaccgaagataaacgctacctagagggattacacaaggtcacacgccaactccggtcgggatactcgtattccaattggagactgacccccacttgggttttccgtttggactcatccgaccgctaggcacgtaactatacaccctggacgataaaggcgttcacccgcctcgcctcagctggtgcgcgtgcccggatttggaagtctaggatttcaccgagttgcttttttatattgttttcgatcatggttcagaagggtgcggattgctaactaactttctgatcgtttgttaagtatgactggaagtgaaggcgcacgtgaagttggacgcgagggtcaggaacgcagtgaggcgtcacgctcgtcgcgtcgagtgcaggggttgctgcctgaagagcaggagtctctggaaaaattggagaagactgctcggaagtcgcgcgctgcgaagcgcaaggcagcccgagaggcgaagtcggcagcgggatctgagacgactgctgaagctggaagttcgggggcgcaccaagtgactccggatgaagcttcggacgaggtttcgggaaaccaagccgacttaaagtcgaccgactcggttcgagatccggttggcgaggacgagtccaaccaggacgagtccgaagaggcgtctgcgggaggcgccgacaaggttgagcccccagctgaggatcgagtttcggattctcctcagccggaagaagaagtcgaagctctggattctggagtgccgacgatcaaggaggaaggtccactgacgaccgtttgagaagatgaagtgctggacgatgcgaaagaatctccggcttcggctcaagaacaagtgccgtcaactccggtccctgaagtgaagcctgacccagatgtcattgatctgactggagatgaccgagctgaaggaccgactgaagaagtgtctggggcgctggaggcgttgatgacggagggtgaagccaagacttacgtggctgatcaagttcgacgttgggaacgggacgagtccgaaagtgtccctccgactgtgaagactgactggacaccgggaagtttggattccggatcgtacgtctctgctgctctgatgacttcggtgtatctggatcggcgcatggcgatggcgagtcaggccgacgcttggatttcggagatgcagctcaagcgggtatcgtttggagccgcccaagatctgaacgccgtcctgatcccgcctggattgttttttccgtgagagtgcgctgcagtcattcagactctgcttttgaagccggctttgagtctgtgaacttggtccctggttggttccgaacacgggccaacaaggtgcatccagatttggttcatcgagtggtttcggacttgttgcagttgctggccgtcgagttgatcgaatggagacagttggttgacacagcccaagaagctcagcgccgcttgaaagtttctggtcagactgattcgagaccgccacgtttagagtatcacgctgaagatcgggatggagatttattgatgaacgattacgaggctaatctacttggacgcgaataagtgttgcagttgaaggtagctggactccggaagacgcgaagcccgcgagggtccgctgactcagagccccaaccgaagcgtccgcaacacttgccgccgcgtccagaagtctcgccaagtccgactccggaatctccgctcacgatatctccggaagtgtctctccaacacgttgggtcgagaagcaccatgtccgagcgaagtgcgtccatccaggctccgactcgcttcggggtgtcgggtgggtccgatcaatctctgacgagcgcttcgtctgggacgttcacgtcgagagacggctcctcactttcgtccggatggagtgttggcaggttcgccggaagccacatgcccatggcgatgatggcccaaggtggaggtgttccgactggagatggaatggcgatgtgcatcaagcgtgaagtggttccgctcgccccgacgccagttgaccaggacgatgtcgttatgtcggagtctgggtcgactgatgttcggaagcggagaacaaagtctggaagccactcgcgtcgatatggccaccgtcgaagaccttcgtccggaagctctgacagcgaggacgatcgcggtcaccatcggagttccagaagtcgacactcgagaaggtcggaccgacactctgtccggacgctcgggtagatccgctcggtcgcttcggtcggagtcttcagtcggatcgcggtcatcgggtgccacgcagattgccttgaacacaatgaggcaggtgcaggacgcggtgtcccgcatggagaacactcagggctcgacactcgagaagcttggactggcgctgaaggcagaacttggacggatggttcaggaacagctttcagaagctcgaccgatggaaggtgtcgtcccatgacgacagccaggctcgccgcggggcggagactctggaagcgctgcgcgtggaagctgctcgtctggaacgtgagcggtctgaggcactgcttggacactaccaggcccacttggaggcgcgccaagccgaagaggccgaccgcacggccgccatgatggccgtcgtccagcaggacttgcacgacttgcggatggatcgagaccaagagcgactgaaggcaaagattcttcagaagtatctcgtgggacagttgcgcaaccttcagacgacatcggcccaagatcaaggatctgcgggaaaaatccagtctaatccggcaacttaaggacacagacagtccgatcgagcaacttcagaccggaaatccagtcgagaatccagtggcgtaatcaacgagcgtacaagcgcggggcgtatgggacaggacatgaagaacaccgacgaattcctggcgtccaaactgcaggagaccttgaacgcggctaaagcggtgagcttcctgaagcccgctgcggcacaagcccagaaggtggtcgcctcgaaggtgaaggcagaacctgttttcgagtcaaagccccctgcgccgacccgatcgacgtcaggcagagtgtctggatggtcatcgtctggaacgtccatgtcgcccgagccgcacaggcgtgagtcgtcgcgcaagaggaagactggcaagtctcgccgtcatggtgatccgtcggactccgacccgaactcggactctagctctaaatcggactcaagcaacagttcggacagcagctcgtttggggacacgacgcctggagtgactatgaagactgcggaaggaggcactacggtgtacacgttcaaaccgtttgtgaattcgaacacgctggaggacttagatccgaaggcctcgttggcgaccaggattcggtggctggagcggttccaaagtagggcggatggacagatcaagttaaggtgtacgagatgaaactcaagatgcctgcacctgttcggaactggagagcaaacttggagctgaaggtgtgtcgggactggaaacgttttctgaaggcattccgcgagaggtattgcaaggccaacacctcagattcggagcggtactacacgatgattcagaagaaatacgagacgcctctcgagttctactaccggttgaacaaggtcgctgagaaggctggcctggacttcaagtcgtccagcaaggctcgaaaacgccatctgaaggtgtttatgaagaagcttttggacaccagactgcgatcgacccttcaaggtcagcggatccgaagcttgaaggatgtggagtacgttttgaagcgacattatgacatgcttctggacgacgagtccgatacacctctgtcgaagaatgttgttctaggccctccaaagaaacgtatccagccatcaaattcaagcccagtctaccttgctcggactggtggtccacctgacaatgtcaaaccggaacgcttttggaaacgggacctatgtccacatttccacagaactcacgacggcgcatgttcggaattggatttgttcaagactgttcagaatctagttcgtcaaggaatagtggaggatcttccatcttcgcttcggaaccaacttttgggtggagatgcagattctgggggacgtcatttaaactagcgagcccgctggatggggatccagatcgcgccgggcttaacccccccccctgaattgtgcgcattcgcgtacgttggtccagacatccaatcccaaggccttggtcatcaccggtgtatgccagtgatccagactggcggttcagctccacgggatcaaaacaactcgaatctggagttggaatcgtctcgtttggaggtgtctaatccgggtggagtcgtcgaaatccgattgaaaccgggtgaacgtcgtggttgttggagagatcacctgttcgatggaatgaagcgtgtggcgatggtcgatggagctgtaaatggacgtcgaactggaatactcctggaccccggaacgtcggcaagcgtagtgagtctgaaccttgcgcgtgggctcaagctcaaacttcgcttctctaagccgttccgaggtgcaggtttgggacgcgttccaacaatcgtaaccgcgagtgctgaagtcaagatcacattggattcaaatgttatatacattttggatgtcctcgtggcaaatgtcggtgagggggtcgatgcgctgtttggaacggagttcatgtattcggctggagtgagattggtggatcgagatgataaacgtccagacgaaacacgagttgtgttccccaaacaaaacgtcttttcgaagaacggtggtctggatctgcctatcacaccgcgagagacgcttcaccttcgtcccggagaatacgcagttgttcggatccagtacgagcacagcaatccgcagcgggatgtcgtttggcctggacgaggcgatcgttgggtgacgaaagccatctatgccgtaaggtcctgggtggtggctctgaaggtcgtgaacatctccaatcaaatgctgtggctggatgccagaacaccaatcggtcggattgtcgagttcggatgctttccaaaatcaggccaatttgtccggccgggtttacgaagatatcgggaatggcagcgcctgattcgccggagtgaaattgagattcaatccgcacttcgagcagaacgacttgcacaaacgctacggaactcgggacggatcggcggcgaaatcaaagcatgcgaatggccgaagcagttgttggatcgatctggatctacgaaagacttcttggaacaactccaaaagaggaccaagaaggcaatattccccgtcagccatcccagggacgatatgcttcgggatccaggcgctggcgacacatcggacggtacggacgacccggagacgcatcagccgctgaccaacaaacgcgatgacatacgcgaggagcattcggagacggaccagttttcttcaggcgaagtttatccagacggggacgagtttttcgattctatctgtctggatgaagttgactggggcgatggtcttccgcacgaagatcgtgacctcagtgaagccgccaatacagacgcgctggggattccaaatgaccagtgcaaagctgatttcgaaggcgacgcatacgtagtcgaagccattttggatctccgatggtcccaagattcgtgcacgccctgccggagccgggagtacctagtcaaactgaagcgctgcacgaaagcgatgtggtttccggaatcccaccgtgaccgtgaactgctctgcgatttcgatcgtgtgaacaacaccggatgcccggtccattagggtcgagatcgcgcggatgttctcagggtctaagtcgcagtctggagtcggccgcatttgcgtgactggattgtgattcgtcggaagattgatttggtcgtgattgccaattagaattgcactcggggaagccggacgccaagcgagaggaagaaccaggaacgagatgacggtgaagtgggacgacctgttgcaaccgatcagcgctggtacatctggatggtggctgcatttcggataactcgtactggatccagaggtgacgagctgaaatactgcacgttgaccgctgatgctatgagggacgcgctggccgggtgtgagtctgggagatacgatcaaggtatactcaagtcaagatgtttccgaccgaccaggcagaccgaccaaggatggacatacactggattttggctcgaccgggatgtcgacgtcaaccgcggtatagtgaaatcaatgcatgtctaagttgcaggaagatagccacagagataaaagataaatagagttcgttttccgctaaaacccgcaagccgccaagaagagcaggaagcgcaggacgaccgggcaccgcggctaggtacgaccgtggttagatatctccctgaagtaagtacgccaagttaggtaaggggactggggcgtacaggcgtctcagggtgatccgcctattttattttctagttgcagccgtattctcgcccagagcgaggtcctgcatttcatattatcgattacatctcgggcggagtgaatagctccgcctgggacttggctggaagcctattgtgtggtagggtattgatgttggttattttctctcagtacatttgggagtggtgcgcgtttgaagtcgcccagggttgaccagtaccctggatacgactcgttagttgactggagtagtgcccactgtccgagggtccgaaagaataagtgacggatatttgtatttgtgtataactctgtatttgtggttatcgtccagagtcgtaggggctacgtttggaagtacgtatcgcacctcgctcgggaacccaacagtgtacaacaactcaccaactcggccgagctccttggttcgaagacaaacgacccgagagggattgtcacaaggaacacacgccatctcgggcggacatcttctggtatatccgcctgagaagttctaagggactttgttctcccggaacattcgcacactatacacctgggcggaaaaggcgttcacccgccttgcctcagtagctctaatctgaatagagtacatggttgtcccctaacgacggtatgagcgcaaactcccaaagaagcacccagtgagcacagatccgactacacagcccaatggagttgctataggagtctatgcccttgctcggctgcaagctgcccgtcgtaccagtcaccaaagagtgtccgtcaggaagatgttgaccattgctgtcctcgatataagctacgggaagcatatctcgcttgcgagcctatgcaccgaaacgttttagcgtttgtggagctctattcgaagatagctggcagatagaacattgtggggacttaaagtgcccatttggcgccctgctgagcgtgcgaaccagcatgcgagtgacggtgaaaacgagggcttcttgacgacgagagtgttgattacgtcaaataggaggatatggctctagctttagggatatgcgactattcactcaatatgtgagcgctgcagaattgacaagctcgtaggccaaatgcagataatatcactcgctgtagttctctgattttcgtgaagttcccgttatactacttgagcttctatgaattggcgacaattcgaatgaatacgcaataattgggctagagatctaatggcaaacaattatcacaatccctttgacaaatctcagtgaaaataactgatttatggaaattcctcagtggttgtcagagttggatgcaagccgctttccaagaagaatctcatcatcttattggacaaaattcccctgcattacaagagatcttaccccagctttttctttccaggagattacttggagtccaaggagtgagcgacacacaaaataacagcacgaagatctcgtcgcggcaagcgaactaagcgcgaagaccaagaagaagctggtcttctaagaccacgatgcggtcaccgacggcaagtcatctctgcaggtcgtcctggattggctatccacggaggcagattacagcaagtggcggggcagcgaccatctagtgctgcagtgcgaactgcgctaaagcacgggcctccagcgagtacgagttggcatctttttgaatgaggcgagggtcacctgattggttaggcgacctttcgcctaaccctttgcctgattggatccagcgagcttggaaacgtagtcaaagttcgcatcctgtcattggctaatgctcctacttgcatccagggcttgcatccaagtctgacaaccactaacagctttattttcattttcattttcagaataaacggatcgttttgcgaacagtattttggcaaaaatgtattgctgttggcgtcattcctacagtaactcttcagacaccgcggtttgttgctggtcgcgaccgctttgaaaaacggtaacgttacgtatttccagcgaactaatttcccgcatatcatatactgaacttaacgccccacttaccgacagagtccacttcaaccagttgtcctcatcttcgagcagaagagcttcaaaagtacgatagggtaggttgaagttagtataatctggagccgatattgtggcgttttgttctccattgccccttcactcagtaaatcgtagagagttgacccccttcaccacgaattcttttgaaaaccccactctgaatccgtgcacgccggactctggtcacccccaagacgagatttctttctgtcaccagcattttctgctcacgagcagatttcgttacggttcctctgctaggcacgccaccaagccggtacagtacgtgcctccaatcggttctacacccacagctgcaggtcagcatcctttggtgttgggctgtcattgcccaatcttccgtggccccagcaagcctccctcatcactgtcagaatcatggtctccctgtcttcgtcgctcttcgctgtggcgctgctggctaccgcgtctgccaagaaatcgactgccggcaagtggtcggagactgcggtgacggctgctaacagcgagctgctgtacaccacgctggccgacgagaacgcctacaaccccagtatccaagacttcatctgcgtccgcgtcgtcgaaggctggaaacgaagacagcggctgcaagcaagcacgttcgccaggctgactcggactccaccagctacaagttcgtcgttggcggttgccttgtgcgcaaggagtacggagggcgttgcttcgagtcgtatttctacccggaatgtggcaacttcgacgtcgtgatctcgccggacgcgaagaccggcgactacgcggttgactcgatctccttgcacaaggcgaaaaagtcgaagcactaaacatgtaggcctcgaattaagtggatacttaagtatacttcgtagataaacacgacgcattccgatgttgcaatctcaagtggttttcatcatcaatttattttcaacctcgcggttcatgatgatcgacaagcagcttgcaccaattagccagatttaaatatattcacgccgcgctcattccgatggctttggcgagttgagggagaacggagtccgaccaaggaaaaacataacttccgcagtcacgacttagtttccaataaaatcgtttgggtctcggcggggagctgcagggcgatatcgagggcgtagatcgccgctttcacttggcacgccctttgcttcctgctttgtcttggaacgatacgtcttggggtatccagagtacaacactcgccggttgcgccgcgcctgcttcatggcgtgataccgcgcgatgacaaccgtcagcacgacgaagaaccccaagatcgccacgaccggcagcaccaactggcgatagatcgctgcacctgcatcgagcaccactcgctcccatgagacgtaaacgtcgagcagcctcttgacagcgccatggatctcaccttttcctgcagaccccgcagtgccgtcaccagcgtcgccagtctccggtgacttggagcgactcgtctcctccaccgcttgctgtcgtttagcctgctccagtttcttctgctcttccaacttcttctgctgctccttctcctccaactttcgctgcacttccaacttcttctgcttctccagcttcattttctgctgctcttcctgtagccatcgctgctgcatttcctgtctcttcttctcctcctcccgcaatctctccatctccttcaccttctccacctcctgcttcagcttcatctccaactgcttctcctcttctctctgtctctcgagctcctgcagcagcaccagctctcgctgcgccttcttctccacctccttctcctcttcaatctccttctccagctgcttctccttcagcgcctgccgcttcgcgcgcgtggccgccctgagcgcctccaccgtctcccgccacgccgtcacgttccccaccgccgcgcggcgacgcgcgtccacctcctgcagcgcgcgctgcatctcgcgcctcacctcttcctgcaccctcgccaactgcgtgcgcgtctccactgccagcagctccagctgagtgtcctccatcacgaacagctccgccacttggctggcgtcacgcagctgctgtgccacgacggcgtacgcgcgctgcgtctcctccatcttggcagccaccagcgcgtccattgctgctacctgctcgcccactgcgcgcgcggcgctggcgcccgcgcagcacagcagcagcaagctgctcacccatcggatcggcgcgaccatctcttattccagttgggaaatagatatttggtgtgcgcacacctcaagttcttgaaacttggactagagcataaaccattatatttcattcatggacatccgcttatatacttggtgtgctcacaccaattaatcaatcttggttctatcttgcacttcaacgtcgacgacggtgacaataccgagctttctacagaactctgcctgaataccgaacgcctgatatatataagggctctaggtttataaagtgatctcagcgttaccagagaaaaggctgtactgaattagtttatcttagacgggatttgacgcttgctgagttgtttcagcgctgaccttcgatcaagcgtgttcgcaccacatcagtgcggttagtagctctactttgtactactcgtagagggcttagcgggtagtgcgcaaatgtgaaagtggaatcgtaaatacagagaagatcgcacagacaatcaaaagggtgccaatttccaaaccgagtacttttagccaaacaaacgtatcctggatttttatatcagtacctttgcccatctccgttcgtcctgttgttggaccttgaagtattatttatatgaggttatgtattgtatacccgttcggtattgaggcagatttctgtacgggaaacgcttattgtgcgctcttcttccgaagtcataagaggaaagcaccacgtagaaggtagggctgaactcgaatttatatctgggcgatatgtgcaagaatttgtcacatagatatttatcgtgagtagggcgacaaaacttgcagggggtcaacgatcgtttgccagagttggtaaaggaggcctcctagaaatacaacgacctaccgagctttaagctgattcctttgggggcagaacaatctccggtgaacaaccagcgacgggaaagccttgaggtgcagattgctgaagacgaccattctccaagtttcgccgtcaagcacaaatgcagtactcctcctccatgctctcgctgggtgccattgcgttgcctcttgtgggtttagtgttgctcgccacgccttctcctcgcccgttaacgtaatcgtctgctactgaagctgaccgaaagtttctttacgcgacgctgaccaacttagacgcgtacagccccgacatctccacgttcatctgagcctacgacgtggtcggctcgccaatcgacggtactaatagcaccaaatttatggtgctcggctgtgcctggagtgccgagaagaagggcaatgccccaacgatggaccttacaacatcttggaaaataattaatacctgctgttccagcactgtcgagctgttggcaccgtacagctcctattgacctgtcaaggacccaggtcagctgttgttttccaacagatactacgtagtattttagattaaatgccagttgcgagctcaagctgcgattcgcgcgcatactcgctcttggataattcaaaaccgcctcatcaaaagcacttcagccataggtacatcggctattcccatagctagtaacttgcaaatggactgctcttgtccgctgaagaatcaatggagaacagaagtaaaaccaaagcgctgtaggttcatgtagcagaaggtagtgagcgattgcaagggcacgtagcagaagaaaacctggtactgtactcgcaaattagggccgcgcggagtttcgagaggcggaaaccattgccgagcattcctgcgaatgggcctgttcccgcaactcggagtaagatttcccactgctggggtctagggagtgtaatccacagtccacactcatctcaggagaaatccatgaagaaagtagcaggttaaacagaaatcaacagctgaacagggctcatgacaggcgaacaggggctgtagatgggcaacagccgaactgtgctaaagtaacagctcatacatatcaccccaatgtcttcatctcgaagggcgacacgaccagggtgaccgcaattgaggagcaatcggtcactgacaggtcggatgaagtggtaagccacacaagcagataagcacccaagggtttccctgcttacaatgcgcacgaaatgcatgtagcgaatgatgaaagttttgttgttccacgtcattgctcgaaattttcaccactattgactgtccagctactgcgcgtgtacgagtagaatagtacgggtaccaaatgcctgaggtagaacaataagcgtgacgtgaagctaccagtaagttaaacatcgaatttcatcggacagatacaaatactttgggaagtggcgctcccttgaatgacaaatgtcttgctgtctagtgtttggacttcattttgtgcacagtgatcgacgtcaccgtgtagtcattcgtcttcgaatccagggagatggcggtgtcgaagttgtcgcactcggggtagaagaataaagtcgagcgacgacccatcgcctctttgcgcaccaggcaaccgcccacgatgaacttgtagctggttcctccagcctgacgaacatgtttgctcgcagtcgaggtctgcctctccagtccttggaagagcccgaaacaggtcaaccccaggtcaggtcaaaagtggtcaacgcaagtaatcgtgccatgtgctgattactcgagtcaactgtcattgccagtagtgctagatgtatcacacataccgcacactaacatgtaagcacctattgacgctcttgagtaagccagtatttcgtgccaatttatgtaaacaacacctacaatggaaagtggcaacggtcaatcggtagttacgcaagtgtcggtgcaaaaggaaaactgacgctagagctcaacttcatccggcataacttccatcatttgagctttggaagcgactcagcgatgcggtcgcgctctcgcacttcacggagtacacggcagcagcgggcttcacactcaacacgacgccgatcgcggcgtctcgctcagctagcaccagagcaacctgccgtcgagcaacaagctcaagacacgcaagttggtgagaacaactgaaaaagcggattaatcttggtaactttttcatgaatgctaacacattgctatatcggttgattcgccccagacactacactggaacgcgaatccgctaatgtcgaaccgcttaatgccgctagcgacgccttattatccagacgtgttcaactcacactggcgttcattttgaatccagagccagtcgatgcagagtctgcggcccctccccgcttggacactacggatctatcacactcaaacaacacttttgacgaagactacgagttcggatttccggataacacgcaccagaacgagagtttcgacgctactggggacactttggtttcagagcaccaaagccacgacagttctgctggtctcggcgagtctggtcagccccgtaggacgggacgaacgaacaagtggattggtggatataagtacacaagaattcggaagacgagcaagaaggtttattaccggcgcagccattaccgaagcatggactgcggaggtaaatgccacttcgacttccgcttggaatcgtactgcaactttgctccgcacacttgtggtacatctgcagtaccaggtgaaggataccagattggtcccagcgttaaccagaatgtgagagaagcaatgaagagggcggttgacacgttagccgtcacgactacagcaaatcgcgctgttatttgggatatcgtgagggtcaaattctacggaaacccgaacacgacattgcgatctccggtttatcgagggaggaagtcttacgacgtgtgaatcgagctagagcggaggagttcggcggatctgtttttggtcaaatcgaagtctcaccttggtcgcaggtccagttggacgacgggactccatccgggtccaactttttcctgttccactactcctattacgaccgcaccagcaagtgccgacagcggattttgggttgggcacatccggttcttttgaacatgctcaaacacaaaaagacggatgtgtttgttgacggaacgtttaggtctgtgccaccgaagttcaaacagtgtgtgatattttcgacctacgacaggcccacaaagtcgtactatcctgctgccttcgtgttgtgctcttccaagaagtatgatgcttacttccatgtgatgcgacttgtcctggatgagacggactatgccctagatcctgagtttgtgtactgcgactttgaggctggcttcattcgcgctattaaggatcactttcccaatacgtccgtggtcggatgtttgttccactttaaacaagcttgtcggcgcaagatgaaggcatacggcattcccgaccgcgagtgttcaattgccatgagccatggtgtactggatattctcactgtcatcaagcaggaaaaggtgaagaaacagggaataccatgggttaatgccaaaatcgagtccgagtgcattcgagagggacgtgggtattctgcagagaagtggacaaagttctggaggtactttgttcgaacgtggattcttcggttcccgcctgctctatggaatgttgagccctattcaagagcgacgatcagcaggacgaataaccccctcgaacggttcaacagggagatgaacgcatctttcgaggcccatcccaacttgcccgacttcgtggtgggtattgaaaaattcgctcgtagatatgcaaacttgaaggctgggcagagctaaggcacctgaacgacttccaatacggctcccaaaacctgccgcgcttcctgaccctgtcgatagttcgggggattcttcgcccagtgaagttgaaggtgaatctagcgaagatgatcaaaggaacgtattgcgacctgatttacgcgcgaacgtggttcaccgccgtcatggagaggccgttgtgacagtataagatattgcccgtgcgaatgagcgaaccgagtactacgatcagggcgacaccaaacgctctgacagcgacatcagcagctgaaccaagccgatcaaggtgttgagatgatgaaatctatattctttaatgcatgaccaatatataccagcgctttacctttgcatacaggccgaggttcttgtcgattgtttagcgtttggtatttgaagcgaaagcagggtggatggaagcgagcaaagaaggatcaggatcaccatcaacaccattctgggcaagtgcggagcgtagctcttttacgctgtgctgataatttcgccaggcttgattaattcttccggcagcaaactcggggcttggtgcatcgctgtcgtaattgggttctgggggaaacgaggtgttcgacatggcgctcgttaaaacatcgccaacccggaggcaaacagctctaaacgcgtctgtgctcgtttgacatcggtctcgtgaatgcgccagataaatggcgttctttacgcccgaagccatagcttcaatgacccctgcaaggctcccattattgtaggccgtcttgattcgtagctcttcctcttcgcacaccacgctgtagtactttgatcgatttcgattgagcacagccctgaggtgtgtcaagtccttgccttcactctgtggtaaggtggggccggtcttgggacctcgaactaaagtagatacatggcccaatgctgccatttcagtcgaagcagccgacaacgctggggtagccgcctttgcaccaggaagacagcttgcgtttgtcttgcgcttggtccgaatcgtggacggcatcgctaccgatgtcggttgtggcgtcgccttggtgcgctcatctaatatcccctctgattgatcagggaacgtatcatcaggcgtctcctgcatcaaacgagctttcgtcttgggagacagcgccttccaggcgtcccggatgcgcttgccgccgtggttccgcagccatttactgtcgcttgattcccgatcggtggcatgtagacctttccccttgcgtgcatatttcttggtgtacttgttcccgtcggtatcggcgaaatgccacacagccgcgtgcatcttcatcttgctgattcgagcgcaataagataacgaacacagagttagatagcccaagcgcatgcagtatttttgtagctttgcagagcggaacggatatagacctcgttgcctcgacgtctaagcgctgaatgcttggtccggtagctcgataaagcttctcaatctgaagcatgcatatttcataataagagttcgtgcatctggagtaactcatccggagtaattaatcaggaataattcatccagagtaattttgaccaggcttccttcacattagataaagaattcttcaataattacatgtatgtacctgcaatccgtcgtgtagtgtcggcgtagtacatcgtacgccggccaagccatgcctcccccacgctgcagccccattgtccatcggcaacacgcctcagtcgagctagaggctgggcgtgagggaaaccggtgaagaccggatgtagataggcgtacgaacggcacgttgctcgcgctggggtaagttaaggaatggcgcagctgccacaagaatgcagtcaaaatacatcactgtcgatgtgtttgacatgtccatcaatcactgcaccacgatgaaccagatgcattagtactctacagctggagcttcactaacatgtgctttgtagaatcggtgcgttggccagcgttgatctgacctggggttgacccaaatcgaaggctaccccagtccttcgatgacgcgggtgcagataaaaatgtcgacattggggctgtaggcggtcttgtcgcctagcgtgatatccagcaattcgctgtctgcaacggtcaccgtcgtgaccatttgttggccttcttggcggctgcggtacccagcagcgccacagtgaagagctaggaagcgacagcagccaaggaaaccaaaatagtgatgtgggaagtgggcgtttgcttgtgtcaggaaagcagtgtgatcaatgccaacgcccaaatgagccgtagctgtagaagtagaagtagaagtagaagtagaagtagaagtagaagtagaagtagaagtagaagtagaagtagaagtagaagtagaagtagaagtagaagtagatgtagaagtgccggaaacacgtgaaccgattagaggagcgcactggctcggtggcgtgcgagaagaggaaccacagcgagatctgcgagtgagcgtgtattgacagactgtcagcggctggcgcagttggggacttgcgctcggtagagctgtcgacgtccgggcttctggacgtcgactggacgtcagcaacaccttggtgaagggtcgttatcgacgtcgccttgacgtcccttgacaccctaccaaattaagccatataattggccaaaaaggttatttgaacgccaatcagaagcacgccatgtcttagctcgtcaatgccacattcacgaagcaagctgcgccacatcaagtgttcgggatggacaagatctcaaatgccggggcgccgtccatttcctgcgtgagtgagcttcagatcaacgaccagtggtctgttgtcggcctcatcctccaattcgccgcccagatcgaagtccacactcacaggcctgtaagcatggaagctcattccgatatgcgaggccacgtctggccggtggctagcccccctccaagaagctgcgcaacaccgtcgtcttcaagaagccgtccagcgtcgtcttcaagaagccgcccagcgtcgtcgccaaagccacctcggaaaaaggcaaaaaaaccaactccaacaaaaacctctccgcggagaccagcacgaaagtgcccaactccatccaagacaactacaccaagaggagctttcaaggacaagtaccccgtcgagaccaacgcgtgcaaggctgactgcgccatccgaaacccgcatgcaaaatgcagcccggttaaaccattcagctttcagcccaagctcacacaaacaacttcaacaggtcccgaccgccaaaggcgtcacgagttgcccggctggaagggcatttgaggcccctaagcagcgggacaagacgtactggcagttcgtcgtatgtgtggtagacgacaagtacaaagatattccaaggcaagacctcacccgcgaccacgccaaaagcttctattgctttggatgcaaggaggggctttccatcaagaagggaaagagtttggttggcctccacatgcggaaatcccacatcgaggccttacgggctttcaaagaaaatgagcggcgtgaagcagccctgaaacaatcgaaccaactggtgaacttgtttgaacgaaaagatgaataggaacagagcttcttcgagggcattttgtcggaatgggtgggtacggatttgcggcctacaagtatcatcggcgacagaggattcgcgaaggcgaaaaggtttgcaaacagcgcaaccactgttcttgagatcccgtcgagacaaacggtcgcgctccgtgtccacgagaatgcttcagagcgccgtttgtcactgcgagtgatgctggtgagcgacgacgaatgtgacttctattcggcctcgtcggatatttggacttcgataaagtgtgaaagctttataagcttatcggttcagcctgttcaacatgaagtcgtggacacttgaagttacctctattcctggaaaacacgatggagaagccattgcagatgtactgttacgttgctttgtgtggtggcgtctggaccccaagaagtgtgttcgatttctacgagatgctgcgttgaacatgaaacgtggatgcaccctccttgggctcaatcatcgatcatgcgcagcgcactcacttcacttcgttgtagccgcggcgcttctgcagaaaggagatgaacgaaagaaggcgatagcagttactggtggtgccagcaccggtgttagtcctggccaagttggcagtactctcggcaacgacgtctgtgtgcgcagtgagcagtatgtggaaacggaaacccagtggatagatgagcagctggatgccttggaaaatggcccggactcggacgacgacggtgaagacgaagagtatattagtgaagctgatattgatgcgctttgcggggaagttgccagttttgttgcagaagccgagaaatcggcggctatggaaattagctcggctgatatggagctggttcgcaaaacggttcgaaggttccgaaagctggcggactacttccatcgctcacaaaaggctcgcaatcgactagatgagctgcagtctactcgaaaagagcccctaaaagtgttgatcgattgcccgacgagatggaacagcacaatggttatgctccagcgctttttggatttgcagcctgtggtgaaagatttttcctgtacattaagtcggaagaaggcgagaaggagtttaacgatcgatctacaaaaacgttgaagcttccaagtgccaagcattggttcatgattcagtgcctggtcgagctgttggccccgttcagcgttgccaccactatgctcgatggagagacctatcctacgctgatatatcttcatcttttcatctcttcactcaagcgatcgctggacaaccaacaaatatttgatgttctctatacaagtgtcgagaaggaggcatacgcaatagaagtgctatccatcatgcaatccgtccgccgaagcttttcagccttgttgaagcagcggtttgataaggaggcagaccccgtccttttgtggatatcgttgcttgacctctacatgacgaattcggcgattttcactgcggatgaatatgagaaggcgcgggagcagtttgccgatgagatgttcgtgctaaagaagaagtctgctttggttcacaacgacgcagctcgttctcaaagccctgaaaagcgaatgactgatgctacagaccgcgctcgacagagcttcctaaagatgttgtacggatcgagaacgtcaagatcatcagctgcgacggacgacaagttaaagactgactgcgagtgggagctaagcagctacttgaagcagtcgagcgaggcggaggtcaaagatcccgacaagcccccatcggctttgtcgtggtggaagcagaaccattcaaaatttccgactattgctgttcttgctcgcaagtggcttggatgcatcgctacatcggttccctcagagcgcgcgttttccactgcaggtaacacagttacaaaacgacgttgttcgctgaaggctagcacagttcgggatatggtgtttaaggctcaaaatggagcagcatgatatgtatctagttagtgatgacaacactgtaactaacatgtataatgtttgtgtgcgtcttcataacgaaacttcttcacgtatgtaactcatttcaatggtgcttctgcgatagtattgaatgaagatggtagagcgcttctgcaattttgggccactccgtcggatccagagacacacaagccgtgcacaagtccggcatcgattgaactaacctgatgaaaactaaacagcgccatcatctagatgatgaccacctcagagactttgtggtctgagtcaatatccccgcagccttttgcgtgtgaatacgaaatgacatgctggtccaacacgggcagtacgactccgaccaagaacatgtcaacgtacacacaccacctccagcgccatccaccgcgacatgccaacgccggccgtcatctcgtcgtcttctcgcttagctgtgagattggtctctaggctggaggcgagctggacgttatcgacttcaagtctcgatgcagtacttaagtctcaagcgagtggaggtacgtgagcacgtacgccgcgttccgagcgatcgtcaacttgctgagctcgaagcctgtggtacactcagcaacgcgcgtaagtcgccgccctccataatctccgagacggcgcacaagtccgtcagtgagtccaagccatgcccgcgaacgggacactgcgcgcgtgctcgagcgtcgcgatgagcttcacgtcggccaggagtgcgtccacgtgcttgacgctcttgcgcactttcagcagcagcatctagaccgaaacgagctgatggttgaacaggcgtctctggagtcgtcgatggacttggcttccgactccatgagggagaatgggacctttgaagccgttctcttcctcccgctcagtgtcgcgagactggttagtctggccgactgtcggtcattgccgcacgtcgtacgggcctactcagaggaggggtcagctgagttgacgatcaacttggccacgttggcggctaggtatggcgtgtctgtcaccacgaagttgtagccttcctgcaagtcacgggaatacaacctagaggtgatgtgagttcgctgacacagcacatgaccaaaagagttctgctatctgagactacctgtgtattatcggcgcgtaggcctaagggtagagaatccaatcccttagaaggtggcaatctagcgttcctgagcttgtagtcaactacggtagtcgagctaacatgccacaaaatagaatgcgagccgccatatgcaatgaagcagcccccacaagtggcatctcactatttcgaaatagtgaccaagcgggtggtgtcaagggcgttgatcagacgtccgttggcgacttttgacgtctgggtgttaaccttcgataacaccggacgtcgacagctctagcgctcggtagaaatgtccgggttactgtacgtaaagtttatttacagtcaatctcggggctttcgagtttcattagcttcaacttgccctatcacggttctcgtctgatcgacaatgagataattacttcagtcactgggtgaagtgttacctgatcgttgttctagccacaatgtgcatgtacgtacgtgtgtaggtcgaaaccgaggaacacgctgagaagtccaatggggacggaatctagccccgaggtgaacccttcgtatcaaacgattattatcggcgacacgatatgctccatctccagtagcatgtgggttcgacccccccccccttctgcagtcccatccaaggagtgcagcacttgaatacatagggagttttgcaaggaacgaaatcagtcgagtcaagactacatttcgtttgcaagggtcccacccaggacaatgaagatcacgaatctgttcactgtttcgggtttcaatattttcgtgtatcgacacgctcggctaaaagaatgcaagtgcgcgaatacgttgactgccaaccatttcctacatatcgtagactttgctttagacatgactcatgtaacgtgtattgtggatttacggtacgaacgcaagcgattcgccaggtcactacggctccctactttggcgagcgttgcgtgtccaggctcgacgcctgctgcgtttcctgctccgaagtctgctgcgatgcctggttcggctgaggcgtttgcttcgatgactgcttcttgaccgacgtcaccttgggcttgccggtcttggagtccgacgaaaccgcgatgttgtagctgccgcagccggggaagctggtcagatcggggcaacgacccacgaactcctcgccgccggcgttgcaaccagtcacgccgaagctgtagttggaggtcttacccgcctgcttcttcaggctgttgaccttgtggacacagaggtacgtggagacgctggagccgtaggagctcacatcgcccaccgcggagagtagcagtgtgttgtccgcttcagtcacgttgaccttggtccacgcggcggcttgagcaccgtggatactgacgagcgccagagcgaagattgaagaggcgatgatgcgcagggacggcatggtgaagtggagtgcgggtggttgggtgtcttggacttgtgggggagcgagaaagttttggaatgaaaagacctcgagtcgtcgggtggggtgagtctttatcgtggtggggtttgtcggtcgctactttcttttcggctgttcctagttgtggtaatcacgatgtattggggtgttcagtgcttttgtctaggcggagctgaattccgatcatttttgcggtagagttgcctaccagcggtttgaaaggtcggagagatcgtaatccagctttgcgctcgatacaaacgagaggaaagaaataccgacccgctttcccagatggcggacatcaacaccaattgggcttcaggtgccaacaaggaagagtaaaagcgcaggagtaacctgggtctgtctttcgggaaagctacagtacttactaatctgaatgtacaaacattggacttcgaagcatttgaaatccgatcatgtcttggcgaaataactgaaaggtgcacgtaggactctgaatcaaaactccaggaactctgtgcaaggtccacgccgtgatgagttcaaagtcggaagcgcaacattggaatgcgaagacttgtttattgtgtcgggccaaggacattgtactacatgtacatcgagttactaccagaagcatagtggttcgatgccgatactattacccccgtgctcagctcagctcttgcagcgacacttattagcatatattgaaaggctacgcagtagtagtattcagataaactcaaacatttcattatgatcgcgacaagcgcagaacgaattcgaatgctagtcctacttcgaagcctgctgcacaccctgcttcggtggctgctgctcgtgctcgccctgcttcggtgtctgctgcgattccttcttcggcttcggagcctgcttagctgcctgcttcttgaccgacgtcaccttgagcttgccggtcttggagtccgacgaaaccgcgatgttgtagctgccgcagccggggaagctggtcagatcggggcaacgacccacgaactcctcgccgccggcgttgcaaccagtcacgccgaagctgtagttggaggtcttacccgcctgcttcttcaggctgttgaccttgtggacacagaggtacgtggagacgctggagctgtaggagctcacgtcactcaccgccgaaatcagcagcgtgttgtccgcttcggtcacgttggccggagtccacgcgccggcttgagcggcggggacgctgacgagcgccagagcgaagaatgaagaggcgatggtgcgcagggacggcatggtgaagtggagtgcgggtggttgggtgttttggacttgtgggggagcgagaaagttttggaatgacaagacctcgagtcgtcggttgaggtgggccttcgtgctgttggtggtgtggtgtcggttgctccatacaacatgtagtaaacaacgagaattaattctctccttccagatgttcccatttgcgaagctcggaatcaatcgcgacgtacaaagatcgcagtacgcacaccctagacgttcatcgtcttatcgccatacagcagtaattcgtggaaaggtggaaaccagtaaagtgcggcttaattaagcatccgaaggggagcactgcccaagaaaatagcgcccgggcgagtttctggcgctcaaatattagcctccagtcgggttggagctcgatgttaccggtaaaatttggcgaagagagtatcgtcctttgtcgattgtcgacgacggacttgaggcaaagcctcgaccaacaaagcctattaatcaatgcccgtatgtttgttacgaccgtcatcattgggatcgcgtggatgggctgccgttgactcagtgcgagaggagctggttagacggacggatccggacatctggaatgaaccagagtatcaagaagagcccccgcgtgaagatcagggttcaccagcagaacgagacaccgtcaagaacaagaaagaggaagctgtagaagaagaaaaaacagtgagaccaccaccaggattttaatggtcaaggccaaataaagtcacttactactgccgttgactcagtgcgtggggcgggaggcccctgcagttggcgaagatgacgcgccagctgcgccacaagcacttcgtaccgcggttggaggctccaacttggagctccgtgctcaaagtgttttgcgccacatgtatgtacgtgtacggtatggggatactcaacaccaacatttggtagtgcattaaatgtcaaacaaaagatgctaagccaccatttgcggaaaagcggaagattcatgtaggtagtgcattaaattttaatgcaataacttcatgaatctttcgctttttcgcgagtcggcgttattacagatctgaacccggctagaacgcgaacgtatccttaagtaagcccagactccacaccacgataagccacggctttgctgactggtcagcgctacggcttaccagggggcggggattcctcagctctcagtttgcacgcaagccaactcgctggccacccaccacaccatgccttcggtgatctaaggatgccgttgccccatggataaggcttgtaaaacagtatatcaacaaaactcagctcgacaactgcgtgtgtattgtagagttacgcaatcctatgcatgaagttgatactcaaacatatatcattgtcgaccacgaagaatccccatgaagagctgtgaacgccttaggtacggtccgcaccgatctacccctacgcttgcttcttgaccgacgtcaccttgggcttgctagtcttggactgcttggcgacaaacacgttgtagctgccacagccggcaaagctcgtcagatcggggcaacggcccacgaactcctcgcccgcgttgcaaccggtcaagctgaagttgtagttggtggggccactggccgtcccagcttgcgtctcgaggctgttgaccttgtagacgcagaggtacgtggagacgccggagctgtaggagcccacgtctcccaccgccgaaagcagcaatgcggtgtccatgccattcacattggtcttggtccacgcgccggcttgagcaccgtgggcaccgacgagcgccaaggcgaagagcgaagaagcaatagcagctagagacggcattgttggtgatcgggaggaggtgggttgaaggtggcggggcgtcttggacttgttgggggcaagaagattcgggaatgaagacacgttgggagtggggtggtcgtgcatgcgtgtcgaacgctgtaggatacatgcacagcatgtcggtcgctatagatacatgaacagcatgagtttatctgtctccacagctgttcgtactgatcaaagtggtttgtaaggttacaatgttatatgaaaatttgttatcagattaccatcgtttcaggactattctgggtagctgttgcaatcattgctttggcttcggaaatctaagattaccaacaagctatgtggtacagtgtgttcatgcagcgcattgaacgagtgtacgacggctaagaactcgtgttcaatgtatctatcgctccattggagaaaacatgtgttctgggcttactgataacaggacaacgcatgctgaggggcccgatacacagttatccatgcttgcgtgaatgaagagatacagtgtagtgccaccgagcaccaaaccgttgttttgcataccgcgcacgtggatgataataggacagaaaatacatgaggttcgcacaaggtaaccacacggcccggaaaatgtcaacttactactgaatagctcgtgatattaggcgagttcatgaagagagcgcggtcgtttgtcgctcaccgccgacggctttggaacaaatctttttatccatttgtaccgaactgtcgtcgtcattttcctggtgcgggttgagcggatcctgcagttaacggaggaagcatcaatgatgtcgcaccggctgggcggcactggtcgaaaacaccaggagctcagtgaggggtgtcagacaccactccaggcgtatcatatgcatgccaacacccgaatgcaaggtcttcttgaacagtttcgttgcttcgatatcattcatcgcttagagttcctgatatgaactgcatgcactcacatgcacacacaaaaacattgcgcgccgactttgtagtgactagcaacgaaaaagtttgcacgaagacgtcacctgccacaaaggactaaatgtataaaaaactcagcttgagcaatcatatatttcttgtattcgaagttgcacaatttcgaagtatgaaattggtacactctaacatacgtgttgatcacggtctagggtccgcttctacacctgcttcttgacggatgtcaccttgggcttgctacccttcgactcggatgaaacctcaatgttgtagctaccacagccaggaaagctcgtcagatcggggcaacggcccacgaactcctcgcccgcgttgcaaccggtcaagctgaagttgtagttggtggcgccgccggccgtcccagcttgcgtctcgaggctgttgaccttgtagacgcagaggtacgtggagacgccggagctgtaagagcccacgtctcccaccgccgaaagcagcagcgtgttgtccgcttcagtcacgttggccggagtccacgcgccgacttgagcaccatgaacactgacgagcgccagagcaaagatcgaagacgcgatggtacgcagggacggcatggcgaaggaatgcaggtggttggttttcttggacttgtggggaagcgagggaattcgggaatgtcgtgagtggagctctacgctactgtaacgaacgtgcgtcgaaagagataggttcatgtcgccaaggaacagcagctattagttttaatattggggcaaagctgttagttggttccggctgttcaattttcaagaaccatcaacgatatacgagttacagcaacagagttctcgtggttcccatcgctccgcatggaatgagcgcacgatatgacatgggtggccatatgcgcagctgtgacaaaatgacgctcgagggtttatcaacaagcgattaaaatcattgatttcattttcttcaaggcaattaatcattttaaatacaaagtacacttgatgtttgtatgcctgacataaattattgttttggacacttcaaacaggtcaaaatatattgtttgtaataagtattcattgcgattattatcgcccgagatggctacattaattgttatgaattggcccacagaaaattgcgcacttgaaaaacgtgtcaattgctcgagcacgaactgcaccatggtgcgcgcgctgaggcgtcttctgcgcggtctaaacgggtcgctcatgttattgtggtggtgtgctgttgtagggagcgtcggacaaagctgtgggtctcgtgctgctggccattagcgtcgtcgtcttcgtctactacagcatttgggtgctgcttacggtaggctcggcaatggccgccactttctgtcatcacgtcgcaatgaacttacgccgcggtgtgtgtgtgttattgttattgtagccgttcgttgacgaggaccacatcatccagcagttcttcctgccgtaccactacgccatcacgatccctgcggtgctgctcgtgctgctctttactggagccgccaccttcatcggaatggtcatgatcaagagtcagaagaagaagaaaagcgactagagctgtggagagctcggtccaccagggaaagagagaagttgcgcgccttgcgggtggcatgggaggtcaattagtagaattggtcgggagcctatgtcggcgacgacgaatgtacgcgatctatgttccgttcaatcagccccaacaccaaccgcgacgcttgttaccagatgcatagcagcctctgaagcagcgagtccttcgaagtctgcatatcgctacgaaatgtacagctaacgacgcttgagcagccgctgtgaaagcttcgtctttacggctgcgcacagctccgtccaagataagcactagctgtcgaattactgagcggcgccctcggcaggcgtggagagcgtgctctgcggctgcgccaccatgtagcccatgccctggatctggttgtagctgaagcccttgctcaccaggtccttcaccacctcgttggtctgctcctcacgcagcatctattggcagcagcacgagcatcacgtcactgtcaatacgagataacacgaatttgtctcttaagcacgattcctgggcccacctcgatactgagcggcacaagggtcaccaggagcgtcgtcgacagcacccagagccaccggcccgaggtcttccagctctgaaccacaataacaggaccaaaaccgagtcagaactcgaatcttcttgccaagaatgttaccaagtattcatgtaccttcacagcaaagttaatgccgcccttgacggggccagattggcgaatacgggtcggcaggttcaggaacagctcctgcaagggcgaagccacacacgaatgtttagtacagccgcaggtaccactgagactttgagcagagcagcgtcatttcaatgggcgcaccttgagaccagcgttgttgggtcccttcttgtccttctccagctcgcgcagcgctccgatagccgacatgttgctctgcttgctattgacctctggtcgttcttgatggtgtggccaacaatgcccgcccccgtctttacccatctaattgcatatattatgatgtttaccggtttctgaggacagcttgaagctcttgcaggatgagatcctcgttgaagtgatctgggctgctctcctgttgcagtggcgcgttgccatccaatcgacccttctgcgactgcttcactatagctgcgatggatttcgaaagcagcggcgcaaagctttcgatgagttcctggtcttgatgctgttgaggggtgcacaatcgaccagcttcagcgagttgttgtaaaatcaaccggcagcatgtctgcacgccgtcggcgtagcaagcgtcgagagtgctcttcttcaaattaccgtacttcagtccgctagaatgttcagagccagcgacactgatgtcgattgctagaacgagccgagtccgagcatcggccttgccggttaattgcgtcgccgaagcacgcaatggtgtagcaacgagctggttgacaaggtgcgagcttgaacgctggcaccggaggccgtacttcttccagagtttgcacgacttcacgcccttgctgatgccacagatgaaaaagtcctctccgttgatcagtggtgcgtggttagcgtagcgcagaaggcatatttcgatgttgctttggccccttggatccatttctccaagcatcagcgcaacgcagcttgtggaaacaagttcttcgtcgtgaacagcgtacaatatgtcgtcaacactttcccccaactctgtggcgaaccgatcgatcgattcttctccatgttggcatacgacgctgatgctgacctcaccaacgtcgaagtcaaactgcacaccaacaaacggaggagctgtgtatctcagactctggaagtacagagccaatgagtctgcagcgctttcgatattatgcgtatccccaggacatggaatcgatagtctcatctccgtcccggagaagtgctggtgctcttcgtccaccacaaaatgcgccactttcttgactacggccgtctcctccgagtcgggatcgatgcggagctgtacatacagaatcccatctgaacttgaggtcgtggtgatcttcaagcacgcgtcaggtacactgagctgactgtaaagcatcgccgctttgagtccgacacctgggttgttgccattaacacagcacgtttagtccgtccagacactaaacttatcggttctgcaccaacgcaccatattttccactaggacagcctccacccccctccgctcttgccttagtcgtctcgaaggcgttgcagcacagcagtttgatctgatgtgcgtgcatcccggagcccgtatcggcgcacacgatgtcgatgcagcccgtatcttcgttcagcttcacattgacgcggagcaactcgaggggcgcgtcgtcccacgaacagtccgagcccaacgactgcgtcgcatccagcgctgacgaagtgagtgcaaccacacatagcgtgcgaacgttactcgttgtcttctctttttgacttaacttgatgaacagcctccaatgcgctgaccattctcaaacagctccttcaccgcctgcaccagcgcgtctctccgtgtcccgaagcccagcagctccaagttgccgcggataaactgcgcgccgcgatccttccgcttcctctgcatctttcttcgtcttcaactctcccagtgcggaaccgaccatcactctgcaagtcaacgttgaacctccgatatcacatatctgaacctgtggaaacacatacgcttacgtaccattggcggccgagcgctaatcctggccgcagttcctcggactcggactcagcagttcttgtcttccgtgtggcagcgcgagcgacgcgatgacgctcaaggagctgctgaccgaggaccaatggcgcagtgtgatcaacaccacggcggggctgggcgcgggcgctgtatccaccgtgctgctgtacccgcttgacctggtcaaggtgcgctaccaggtgcacgagaagtccgcgcacgcctaccgctctctggggcacgcgttccgctccatcgtggcggaggagggcgtccgcgcgctgttccgcggcatgagtccggcgctgtatggagccacgctgtcgtggggcatctacatgctcttctaccagagcgccaaggagcggtacgcgcgcatggccgacgagggctggatccagggctcgtggcagcacttcttctccggcatcgaggccggctgcgtcgtcgtgccgctcacgaacccgatttggctcgttaagatccgcatgcaagtgcagagcaaccgacgactgcaagcgaatgctacgggcaaggacgcagcgaagaagctggctgagaatataccctaccgaagcgtatcaggtgcgtcgagaggaggcgacacgttggtgtatggctgaattgaggaggctgatcttgttgttattgttggtgttgctgtggtgtagatgcattccgacggatcatagcagaagaaggcgtttcggcgctctacaagggcatgatcccagcgctgtttctcactacgaatggagctatcaagttcgtggcgtacgagcgactcaagggtctgtaccaaacgcactggagccccgacatggacgtgatcccgacgctggcgatgggtgctgtggctcagtctattgcatcgtctactacgtacccgtaccaggtgatcaaagctcgtctgcagcagggaggccccatggcgagcaagtacacaggcacgtgggattgcacggtgaagatcatccgccacgagggctactttgggctcttcaagggtctgtcagcgaacattctcaaggtggtgcccacgggtgccatcatttttgccgcttacgagcagatccagagcaccatgaaggccattctgttggactagagagcggcagcaacctagaatgactgcgaagcaatagagtattctacgaagtacacgacgcttgcacaatatgaaaaaaaataaagtgaaaacttgtggcagcacaaacaagagcgtgaaaagtctattatatatgtaaaaggcgcacgaagtctgactaacaagcgccgcgaggagcgtccacgccgttggtggtcttttaaaacatttcgtcttcaacgcggaggtactcgccgatgtctgcttggtgcagcaccacgtaggcggtgggctccaggtctttgcacatctctgttgcctgcgcggcgatgccgaagcccagcgggatgtcgttcatgctgtagaccacgacgccggcgtactgcggcgtgccctccgtgatgcggccgagacccgacttgaccacgttgttgccgtacaggaaggacatctccgagttgggcttgatccagaccttgtacttggcgtactgggccaggtagtccaggaaggtgatgcgcaggtggaacttcttggtcttggtgagcttgcccacagccgtgccgatgctcagcagctcgtccgagcccacgttggtcgactggcgcatgagcttctcgctgcagtagtacacgatgttgccgtgcagacggaagcagtacttctcgtcgggccgcgtcaccaggtgctgcacgttgcggccgatgtacttgctgatcttctcgaacaccgtggtcatctcatcgtcggtaagcgggcgcatggttgctctgcaaaggtggcgtccggtaggggtcgaagcaattgacacagtaccggtgactggaggactggcggcgggtggtctctcctacgaaacggcatactgcatccgtcgtatcggactttcgtccaatgatattcttttcggaaggggattggtgtaaatacaagcgggggattggttggtcggcgcatttgcatggctgggggcagcccgcggcatggcgccgtcattgctaattttcgcacaggcatcagaaatggagggcaagattgaatcggtgcaggtcttcggccgcaagaagaacgccacggctgtcgcttactgcaagcgcggccacggcctcatcaaggtcaacggcacgcccatcgagctcgtggagcccgagatcctgcgcgtcaagacatacgagcccgtgctcctgctcggccagcagcgtttcgccaacgtacgatgaacttcctgctcttctcttcgagtcgcgggctacgcgcgacagctattggtatcacggacgtggcgacgtggacgacgactcgagcgccagcttcagggtcttctccagtccaatgaacacaccacacacggggtgcgcactgcttcggctttgcctcctcaggaccgctgacagcatggacgttgctccctctgttgcttggctgctgtccacccacctcgacgcacacgtttctgctgtgaaaagcactcgcaccacccacctaatctgtgtgcatgctctgtttaccgccgtgtaaataccatgctgtcgcaactggcttgcacgccccctccctacctgacgatcgatatggtgcgctgacgtgttgtgtctcgataactccaggtggacatccgcatccgcgtgaagggtggtggtcacaccgctcagatctacgctatccgtcaggccatcgccaaggccattgtcgcctactaccagaagtgtaagtcttgaaggcttcgttgaaggctctcaaggtcaagtgaactgtgttgctgacgttgctgtttactttgttgctgctgtacagacgtggacgaggcctccaagaaggagatcaaggacatcctgctcgcctacgatcgtaccctcctggtcgccgacccccgtcgctgcgaggccaagaagttcggtggtgccagcgcccgcgctcgcttccagaagtcgtaccgttaagcggcgtcttccagccgaggggtcgctcctgtttcttcctgctctcagcgcttcgagtcgcttgcttctggcgtgcgctcgcttgtgtctgccattcgcgtggcatggcgctcggcagctgtagacgtctaaggtagcgggagctttcaagccccataataaacgtgcgataagttagcggcattttttcttgatttccattcgtccgtcattaccaaaatcatgctaagccacctccttcattccgctggaaagacattcgtacttatgcgaacacaattatccgagcgtactgtcaaaatcgaacagaccgatctcatctggagcataagcaagctatggcggtcacgggcaagcgcggcgtgggcatcccgaccatcctgctgcacgacggcgagggcacgatcgtgtccatcgagatgaagacgggcgagacgtatcgcggtctgctggacgagacggaggacaacatgaactgcgtcatgaaggacgccgtgcgcaccgacatcaacggcaacaccacccacgtggagcaggtctacctgcgcggcagccagatcctcttcatcgtcttcccagatatatatcctttgcaaccccatacttgcggctgtatattgtacagaagttggtataggacaacccccttgttcaattgtcggttgccttgaccttccgagtggcggacgcgttggtgtgttgttgttgctcttgtggccgcagagcacgttaaagcacgcgccgatgttcaaacgagtcaagatgtggaagaagcacaagggagcgatacccacactggggcaaggaggagttggaggcggcgctccgagaggacaggccgctgcgatcatccggaagggtacgagagatgacatgaagctggctgacgggtggagtgcaggcgctgatgttactattatttggtcattatgcagctcaagagcggagaggcggattttgagacgagcgtggccgtggaatcgggtcgaagttgctgccaagcgtcgctgactgctcctttcaagtcgctcgaactgggaactactgcggcttcttgcctgcggtatggcaggtattggactgcgctgctggtcacgggtagaccactcataagtcccttcaggttcacagccttggacgagtcttaatagacggatgcacgaagacaaccgagtcggtaagtgatgacatgtccttgtagggaatattggtagcttggtggcagcgattcttggctgctctcgagctcatttctgggcgacgtagactgggcgccggaaccccttggaggaagtctggcagacctcgaggaactcgcaactgcggaagccaacagtctcgacgaggtgcttggggaagtcctttggccgcagctgaatcttcgggtagtttgctgccgtgacgtctgacgtgaacttccgcttgtggtacgatttccacggctgtggctcaatgatcaggcggccaccaggtgcaagcaactcgtagatctttgcaaacaccttcttgatgccttcgtctccgtggaaaaggtggatccattttgtaacactaaagctgcaagcacgaaacacaaacactacttaatcagagagacgtccccaccattacatgccaacagcatctcttgataacttaccaagtaatgaagtcgtactccttgccggcatgtgcgtctgccacaatatcttcgcgcttgaaaatcacgttcaacggaaactccgagctgcgtagccaacaccacgcgtatgtaagaaaccacttatgatcccttccaacagcaaaatacagctcaaaacgtacccaacagcagccttgccaatagctttaggaactgctgcctgtgtctgcatcgacggcttccatagtcgaaaagacagcggcatctcgtccgcaaacgcgtctccatcttccaccttcacgtcactcttctcctcgtccttctttgcatcctccttcccctctacaacctcttgcttagctccaccgctgacgtccgcaggagaatcagcatccacctgatccttcgagttcccgtcctctccacctttcgacgacgttttaactgcgggaatgtcgccgaacgccttctcgatctgctcttgtcgtagaatgtccttcaactgtcccctggctctggaaatgagctgcgggtccacgtccacgcccagcagataactaggtgccagacgtttggcgatggcaatagtcaaatcccccgagttgcagccaatatccaagccgcgcttgccctcgaaccagctcttgtccagcgcagcgagacgcgggtcgtcctccagctctccctggtgcttctggcccagtcgatacgtgtagtagctgcgcattcaggtggtacaccaaaagtgtcaattggaatggcacagtactatcaagcggcggatggctacaaacctccggaagttgcccacgcgctgctgcttcgggatcttcttgtgctgcttgcgctgcttcgccggctttgccgcggcctgcgtggcagcctcgccgtccggctgcttgcgcttggtcattagagactttgctaaacaagagatgtctcgtgtggtccacctgaactcaagtgacaacgttggaagggcaagaacgagaagtgcaagcaagttttcaccctttccattcggtttaaagctgcacgtgtaaaccaactatatctacgcgcgcagtttgttgcgtatcacgagctgtcacactttttttttctttctcagttacctaaaccagcatttgcatcaccagcccctgcagcgcatttaaaacttcagtgacgccatttccagatagcatagcagcaaaacagtcccaaacgcaagcgcaccataccttgcttcctgtcggaccaatcgagtccgtaacagtcaatttgcgagctcctttgcctctttaccttatcaaggcgacaaatttttccacgatgcgagctacactaatttcaaatggccccgccatcaagttgtctttgttgatcgaaacgacgggtgtcgcggcctcgctctcgtaggtaagagaaacaaaccaccattcgtagtagtatgtgacgacacctgcgaccttccttgacacgtgcgtgttgagcatctccatcgccacgagaagatgcgcaagaccagtcttcatcgggttctgcttcacttggtacttggttactctttctccccctccttcttcttcgtcatcgtcaatctcttcatcttcgtctgttggttcgggatccgtcgcctccatgacgcacacgtatttgtcgccatgaaacagcatgaagtcggcgtaaccttccacatccaagatgcgcatgaaaatttccaagggatatctgctctggatttccataggcgagctctcaagtgtcagcatggtttgaagaatcttggataccaataaatccaccggaacgtccgaagatcttcgcattgcgcgagcttcttcttgaccaagttctttcgtgagtgctgggatcagctcgttctcgacacgagaatattccagcgtggtagtagttctactgtagcggaatttgagatcccaccatgtcactcgtttcagacgaacggggccggacggcccgccgtcatcgtcgtcacctgatcgggtagagtcgtacagataatagtccaacttgtcccaataccgcgcgcgttcccccaatataccaatagcagatttcctcggcgtgcggcctcgtaccgtcgccagaagatggacattatgaaatcgagatctggctcagctccgcagaaaaagtcgctgacgcgatcgtccgagttgaactggagctctcggtggagcaaaccctcgaggctacgagtctccccctccctgaacttcctcgagtcggtcctaagaaacccctctctcgtttctcgcagggaataacatgacctcatctgcactcacgtctcgaaggtagctgggtagggcttccttggcggcgaccttcgcgtccccgaaggtgacaccggaattcacgtgaagaaggaacagcgaatgtccataagcaccgacaacggcgcacgcgaatgacgtggtcatgctggcggcgatcaagcggaatggcctcaatacattttcaaacttttagggaaatgcaacgaatttttcttggattgaaaaactacgaaagttagacgatcacaggctgcccccgatctctctagtcccgctgacgtgtccgctgcaaattgagtcgctctgggccgttggaatgatttggtttggaccagaagtcccaatcgcctctagctcgtcttctcagtaccaaccaagaatatttccggtgggaattctcccgggcgttggtgcaggcagtcaaaagagccgatctcacgatgattcggtggctcttagcccatttccccggctgccgtgtgtctgaaaaagtggttcgggtggctgctaagagagggcgcttgtgggtgttgcagctgctggtgtaggaagtacttggaacatgcatgtatgacctctctattgaacgcgtgccagacgcgtttcggccccccgccgggggcctcgtcagtggctttaccaatcgagaagtgagctctctctctctacgtgtcctcctgggcggtcgcccctacgaagcttctagaatctcctaaagatctgtcgtgggtacgactctggtgtcgtaaccgtgtatccccaccatggggttacacctacgtgcctgcagcactgctggaagccgagtggcattgagtggagcgcgaaaattcaaacttgtgcagctgaagctgggcactgggaccttacgagatggctacacacggatctgcctgcggaagtggatcgcagcagcaactgtcacctgctgtgcattgctgtggcgcagagtgatctcgagaacgtcaaatgggtgattgccaatggatatcctgtactgctatatacccatatagttgaagcagcagccagcgctgtcaacaatggctaggatacctagaatgtacaagtcgagataattcgctacatgtacttactggaggggggatttgttagtccaggatatattgcggatgtttttgtgctggaagcagcccgtgtcggcgatctgcacctttgtgcggcgtacttcgtaccaacgtgcaatcaaatccgaaagtcgcaaaattcatacttaagtattgcaaatttctagctagcaacttcaattacgcattcaaagatggaattacggcaatcaaattcgcacagtaggctactactactggtccgacgagccctgttacatgccgtacaccatgtcctcgttgttcgccgccttggtgacgaagtcgcgacagtgcagctccatgctggccaccagcgctggggtcatcacgttcatgttagcggtcgcggcgcgctccaggatgtgcatctggcgttccgaaatggagaggatctcaccgttgctgtctggctcacgcgagcgatcgtagattgcgtggcgatccagagcgggagtttaggacgctgcttctcggggacggtgtggcgagtaacacggccttggagggacatctgcgaagaaggcgaattgcgaagtgagctcccctcggtcggcgtcggctatagtgcgcgccaaaccgcgcgcccttgcttttggcgcgagcacagcacgccagcttacgtagccatggagatcttggacctctggtccaactttgattgccgtaattccatctttgaatgcgtaattgaagttgctaactaaaaaattgcaatatgagttttgcgactttcggatttgacgttggtacgaagtaggcgtagagactatgcagttggttttggccaacaaagaagaagactggaattatcagcatgctctcgatacggtatggtgttgatcaggatagcgtgcgagaggaaccatcttaacacgacaggcttcgttgtcagctcagagtgacaaacgaccactcgaagaagtctgtgacggtcgttggggggaaacttgccagtttggtgagttagcgacgacgagagggaaaaatagtgtcttacaagcttttcgagcctccgacaattgaaagcactaggtgcatctaccttgttctcgtgaattgcggacctatgagcttgttgaagcaaaataaacgagagattctgtacaaacgcgcgaaaaaatgctgacattcctattttattgcttttatggccgtctgggcgcctccaagatgctccgaacggcagccaacttctggccaccacggcaagtcttgtccacgcatccttgttggcaaccttatacaagataatcgcaaccgtcagtgaattcgctctacattacttggctgaccttgtaatctacccaccttgtgcgtacgccgtcaccacattgctcgaacttcctgtgagagcagcaaaaaacgaaacaaaacaaaaaactatagagccattgcagccgagaccgaaaatacgagaactcgatgcagcttacttttttgccggattagttcgactgcttcaggcttacgactacagcgagaacgtgaagatcgaactcattgttttcctcgtcgtcgtacaagaagcgcaagtgcctaccgagtgcgctggggtttatctggccgagtgctcaaacccagtcgggcatcttgtctacaaactcggcgctgtccgtttgcagccattcatttctgctcagattccaggtctggaacactgacgtcattgctgcccccaccgcggcaaaacactcgtcgccaatgtctcgccgcgaggtccttttaatctttttcctaagctcatagacgctcttcatccatgcaacaagtttgacttgagagcgtagcggacaacccgatgcaaaaagcggttccagtcatctgtaaagtttcagcgaaatatcctggggccagtttccatcgatcgaggtgggatatctgcaagtaactttttgggaggaatcggttttggttttgcgtgctaaaaatttcctgtaatttctgtgctgcagacgctggtagtcgtgtggggataatatcatcaagtactacttaagtagtagtattataacagtacatactgcaactacagtaggaatggtaagacacgaccgcatacacttgtgcctgcaatccatttcccatgttttactttacttgtacagtgtgcacatcccgagtaaatttgatagactgtcccttaaactaccaagacacttgacttttcttgctgcgcttggagtgattcgaaagagccaggacgattatgcagagctcaccgagtggctctctctcatttttttctttcaatcaacgcctcaaaaaacgtagttacgaaagaaacaacaaaaagtcattgaagccattccatttagtccgccaaaaaaatgaccacggaccctggcactgtccgtgtggatgtgacaaaatcgctacagacactacggcacgccatagcagtgaaggcgaagcttcccgaggacgcacttgagtttttcctgccagtcggtcgggatggcgagtggatttcgtgtggtttcgagggcacggaggatagctgggctctgtccctgggcaaaaccacggacaacattgagtttctgctgcgagatgaggccaagatctcggattcgttcattctagtgactgcacccgatctcggaacatgtaacgcgcattttctggtgacgatacgagggtgcccaccgttgaaatcggtcattggtatattgggggacgcacgtagaacggcgcaagcgaatgacgtggccattttggcggactaaatgggcctgttgttgtttttttcgtacctaagttttggaggcgttgattgaaaggaaaaatgcaagtattacaacggaaacgagcctgttatcgttttatgaacttcacgtaagaagaaaaaaaaatagatgtagttctgatcctactgatcgcattatacattacgtctcggcgtgcttctcggtttactactaaaagcggaaagtttctaagaccatgcgagctacattaagttcattccgccacaccaccaagacgggctcgtagcaaatcgtaacggcatatccatgtttagcgctctcaataaattccttaggaaaacagcagtacagcttgctggcagagctcaaaattgatgggttcaataatggagaacgtcagaggctcaatcgacagcttaccgattagagagggccactcggtgagctctgcataatcgtcctggcgctttcgaatcactccaagcgcagcaagagaagtcaagtgtcttggttctggcacggcaccgtccgcatcagcagttttcttgctgaagctaccaaaagtattgatgactggggcgacgaatattaaaacgccttgcaaataatctggctaagtagtacatcgtgcactcagtgcacgttgtggtcaactcgcaatcgagaaatcttcgatggggtccaatttactgttcaagaggtcaaacgtagggcatggaactctgccaactttcaaacaaaagccgtcatccgaggaatgacctcatatcctcgcacgcaagcacaagaatttcgtgtggcccaatgccatgctgccttcacagcaatcatttcttctgatcgaccggttgcaatggaagactggcatctcctcctatatgacggatatgctgtggatggcaagtgtaggagaggagcgttgagcggtttcccacccaaaatcgaagcagtcggctttgcacacgggaatgaaatataagatggagatagccaatctctagagaccagttgtcacaccgtgcactactatcgacgcctttccgagtactcgcggctgtatagcgccgccagtttcacgtgctggaatgctggtaagagaaccaaagccgcaagagccttggtgaaatcacgtcaattggcaagacaaacagacgcagtgctccagagagcagatattccgcaacacttgaccaccaggttagagaacgaaatgaaggccagtagtagcgataaggggttgcaggatcattattcgattcggaacatcctacagcgattccaggactctatatttctcgctaaacgtaaatagacgacctcttcacacccaagtagtgtcttggtagtttaaattaagggacagtctatcaaatttactcgggatgtacacactgtgcatgtaaagtaaaacatgggaaatggattggaaggctcaagtgtatgcggtcgtgtcttaccagtcctactccagcctctactgtagttgcagtatgtactacttaagtagtacttgatgatattatcggtagacagcactagtaagctactgctacctactttactaagtagtagtaaatgacaatacagtcttcaagaaaaaaaacaaaaacacaaaaaaaacttgatgatattatccccacacgactaccagcgtctgcagcacagaaattacaggaaatttttagcacgcaaaaccaaacccgattcctcctaaaatctccagatttcgttacgaccggttaactgtcctggtaatgctttccagtatcaagcggcagctggttttttcagtatgggtgttgccagctcgctcgtccactttttgtgagcctgcttgtagtacttaaagtacctgaaccacatcacatactgtccatatcgtacatcatccaatttgtccaccaactctttgctcctcattgcactcgcaacttctggtttgagtttttgaaacgtgaacacatcgtcaggagtcgcaccccgctcgtccatatacttgaactggttgaggttaagctttttttcggcatttctgacgctgataccaaaagcggtatccattttagactctggtctcgacctgatcagcttctccatcgcttcaccttcagctttcagtgcttccaatgtcggagctgatgcaaccgttttggtcacacccgacgtagtagtagactcagccggcttccccgatccaaacacccgagcgataaatgcgaaagctttttcatacacggcgttgcccgctctctcttcatcgcctgatgtaccgtatccgtgagcaccaatctcgctggtcctcaaggatctggcacccttgccaccaaccgaagcgacgccgacccggcccagcgtggcgtccgcgctgatggaggctgagacaacattgctgctgccatgcagaactgccacaagaacgagtaggatgaacccgaactgcatggtggcgtggtttcaggacctgaaaacttggcaggaaaatgagaaatggatatgatgagttccgcgagatcgagaagcagcgaggctacagcacaccggctccggaatctacggagcccatctgaaagagccaatcccacatgtttgatgttgtttcgagtcgctctgttgtcattaagcactgatgccggtatcagcttaacttcgtgtacaaataaaatctcgtcggtatatggttttcgtggacatccgatttcaaaatgtctgtgcgaacgcagacttgtccttgagttcgacggaagcgtgcatccagtgaagacgcactccgtatcaacggcggcttggcatcgtgtgtcaaagatcatcgtctgtgacgcttgctacgccgacgccaaatgtactgtaacgaccaacccggagcgagtggtctttttgacgcacatggttttttgtaccaataacgagccgaaaacccatcaggaacgtccgtacagaacctggacctgaatacacctgaaagcacaccttctacgagcccgagcccgtctacttcaaaagtgggctccccctaaaacgagagccaaaagtcgcacaaaatgggctccctcatggtaagtacgagatcaaggagccctggttcgggctccccattggctcccctccagggctccccaaatttagcttcaaatctatgacgggctcttcatagtaatatctgattggccaattttacctagacttaaggcgagcaacttcgcgtgatcgatgcgccacgctagaagatcgagctcaaagatcgccacactagaagatctcgcgccgctcatatgtgtacagccgctccgaggccaccccagcgtcgccgatagtccttccttcccctcaaggagaagccttctttcctatgccttttcagttagaacctggagatacttcaatgacggccaatcatcagcgagatatttaacacaggtgagggggagccccttaacgagggctcacagttctggagggctcctttcacttaacctattgaactcaagagcccaggagcccggctctccccagggctcgtagaaggtgtgcctgaaagttccaggtgtattcaggtccaggttctgtaccggacgtttcagtgaaacggggcgacgcaaggtttttgtaacggagcggcaaaaatactactgtacagacgatcccctcagtagtaatccctaggtgagaaataccctctcaccaggaatataaaggtacgatttctgaatgacagtccaatgcaaagccaagtaattattgccatcacccctcaatagtcataataaatatgaatgttcgcgggtgcttaacgataggaaaagtccattttgaacaggatgtctggagtagtctaaccaggacaccagcccctattgttcatgtttagacctgtttagtgcactgcactaaacaggcctattcatgttttcttgccgcatttcttatttaacgatcacattagctttcagagccagctttcagacctgctagtgccgttcgtttgaatagaatggagctcgggtgcttgtcaacattcgcgagatgggtctcaatactaccatggcaaattattttaatatcagtatcattacctacatcatgacccacatctcttacggtattatatcaactatacgttgtccttttcggtgctaccgaggtatataccgttgtctgcacgaattccatccaagggctgtgcaaccaaaagactacaccaatccgtatcatatatgtggtacagtacggtgtaccaccccatgatacaccctacgacaggaataccctcacctaggaataaaaagtnnnnnnnnnnnnnnnnnnnnnnnnnnnnnnnnnnnnnnnnnnnnnnnnnnnnnnnnnnnnnnnnnnnnnnnnnnnnnnnnnnnnnnnnnnnnnnnnnnnnttttgacaggatgtctggagtagtctaaccaggacaccagcccctattgttcatgtttagacctgtttagtgcagtgcacgaaagtccctacaaatgcactaaagtactttagagcacttttggcgcccctgcacacaactgatgctggacattagcgcgtgcactaaagtactttagtgcatttgtggggactttcgtgcactgcactaaacaggcctattcatgttttcttgccgcatttcttatttaacgatcacattagctttcagagccagctttcagacctgctagtgccgttcgtttgaatagaatggagctcgggtgcttgtcaacattcgcgagatgggtctcaatactaccatggcaaattattttaatatcagtatcattacctacatcatgacccacatctcttacggtattatatcaactatacgttgtccttttcggtgctaccgaggtatataccgttgtctgcacgaattccatccaagggctgtgcaaccaaaagactacaccaatccgtatcatatatgtggtacagtacggtgtaccaccccatgatacaccctacgacaggaataccctcacctaggaataaaaagtgggttcccattgggaacccactttttattcctaggtgagggaacttcccaacgccatgactaccgacgggattgtctgtatctattgcaagccgacttcgcgttattttaatacatgtagtgctgcggctcctgctaaccactggttaggttagtaaccagtgaagccgcagccgtaatctaacttgtagttcggttgtcgtcaagatttccgtgatacggtacatgtagtacacttgatttctggctgggtatcagcttttgcgttatgcccagcacttgtcatcctactttgcgttatgagtaaggtagatttccgtgatacggtacatgtagtacacttgatttctggctgggtatcagcttttgcgttatgcccagcacttgtcatcctactttgcgttatgagtaaggtagatttccgtgatacagtacatgtagtacacttgatttctggctgggtatcagcttttgcgttatgcccagcacttgtcatcctactttgcgttatgagtaaggtgcatggctgcagccacgacggaagtgtctatccacaggtggaagttctcattctacaaaggaactgtgattcctacagaaggggtagggaccctgccttgctgctgaaatagtctcgaggactatttggctttgtgtcacacctgctataacagctttaacgtcaagcatcagcatagacgggtaaccacgcaaaagtgggcttgtgcgctcggcgactctgcgctcactggaaggattcagggcccacagcagtgtgtataccaggccaaaaccaacgttcgggccgctattttgagttctgtgtcgaccggtttgttaccataactcggtaagattaccgtgttaccataacacggtgagacgtccttgttgccgtatcttggcctcctacaactattgatccagctcggcagcgctggatcgtcgcgttactagctccgtgcgtccgttcatagcagcttgcagtctactgtgcctctgatgttcattcaaagagatctattctaccgcagcgcattctcgcccaagaacgcacacgaggcagcctgcctggtcccgtagattattctggtcctcctgacttcggtagcctgtgtcgattatgcgagggcggaccccagcttagacgggcggctcagcgtcgagcgtctcaccgacgacgcctaactcatggtgatttacgtcgccttcggtaagggcatcatgatactctcttgctcgtgcggtcggatcttcatcaaaaggggccacaaatccatcagcacattatcatttggggccacaaacctgtcaaagagtaccgtaagaagtaccgtcgatagccgattgctgtccaggcgaccggtacagcgttgcagcacaggtgtcaaactgcaacgcaactcaagtagcggaacgcgtcgcaacgaagtctaatctaggcacgttttgcggttcattacagaactgctgcagatacgtacatgtataaaccaattgactagtagtccattacgtacttgctccaggacttcgtacgacctcaaggaaatatcacgatccagtaacaccacattggatcgccatcgagtttgctcgtcagcatatggggtacatcgagcatgcacgttgtaaattaccagtaatttttaaaaataagctatggcaaaccagcaatgcatccgaaacgacttaagcgtgctcaaaattgtgcaaccttcgaagaatggcttgaattaccggtgtggaacgtttgccacaggacagcacccggttgtttgcatactcatgccttcgctaccagcaaaaaataaactagcgctgcttgtgtgccgtcctaattgcctttcaagattaacatgggcgctgccaagttgtagatcgagatgcggtagttaatctaagttagaaattgtcgcggtttagaacgttatgtaccccctcagctcaacccaacatgtcgatgatgtgctcgtgcaggcactcgtctacggtaaaagttccgcggtagtaattaacctaaatgcaccttgtacacacaagtgtagatcgagttaccagtgacaagcattgccaaagggtgccgtgttgtgctggtactcagagcaaggcgccatcgattcaggaaataaaattaagaccggtctggcattcgagtcatctatgattgcattaactactacgcgataagttgcaggtaacattgccgtagtctaagcttgccaaaagcctttgcccactggcttgatcgactgtttcaacctttagccgtgcatgcagtttgcaaatatagacggtaagtaactccaattgatttgttgcagttcttgcattcattcggagcacttcaagtcgtcatgtagtataggaacggtttcacagatacaaactgttggcctaataagcagacccggttgacagatatctgcaggttccggcgtaaataattttgtgcaaggtatttcactatcgttgcccagaggtgctcaacagaaaatgttgtatagctaaaattcagtgctgctttggtagagtgcccttttcaggaagctgaaagggaagacatagcaacgagaactcctggaatgacattcaattaggaacagcctacagcgacaccaggactttatagttctagttacgcgcttaatagaggatcttttagagctctcccactaaagagttgatgcaagtgtcaaattccgctacgacatttattctgctcaatagcttcctctcttcgatgcctttacgtcacttattgcgcgttttagctataaactaaacttattatactactgcaaatagaaatggatccgaggaatgttttgttacatgaaggagcctcataaagctcataagcggaagatcactgcaacgctgtaccggtcgcctggacagcaatcggctatcgacggtacttcttacggtactgcgctaagtccaactctttgacaggtttgtggccccaaaatttgatgataaagagctgatggatttgtggccccttttgataaagatcccgtgcggtcccaaagggtgagaggtgtatgagtacaataggttccccatgaacccgaccagctcggacgtgacggtcaacacgaaatagggctagatggccacgctcagcaacacccgggtcaagtggccaaggcaccattgaggtataccagaggtcgcattgtaacgccaaagtaccttccgacaactcagtgctggtggtgtggtggcgtttccaagccgtcgtgggccaagagccatcgcgacagagtggtctcccggctaggtggtcgacagcctttgcctccatgcatgctcgtgtacgtgtattaatacgtgcagatatgttgactaccgtagtcagttatctaccatccaccagtgacttcacgaccaactctaaaggagtatgactgaagcactccgtgtgtgctgctctaagtatttggagggatcgtatatccagactgagagctggctagtgtgagggtcgcggccgcaacactcacaccttctgagatctccctgtattaaggttttcaccgctaggagaaagcagcctcattgccaccatgttttgaacagccacgctgccaaaaacgaaggtggcacgtttcagccaagggtcgactgtttgtttgtttttgaattgaggcaactattgttgtcacttagctaatacgatcatcaaagccaacggccgaaattacttcatgtctactcgcggatcggcgtccgccggcggtagctttcttagccgctcttgggcacgaactcatgagttacagctttttacaccagggatcggacaatatatattggatattgattgtcggcgaggcagtcatcacaatcacttgtgtcgagcattcgtaagacagtttgacgacaaatcaaatctagtgatttgattggcgaatagtacgacttgccaattctgttggcactgccaggcgcagaggctctgctaggaaggcccgcgttcctcttcgctactctttttgatgcatttcgttgcacttcgtatcctgactaatatcgggcgcagcgtagtagtggtagtaatgattggcggttcgatagaactgtgcggaggagcgctgcgacaccaacaaactccctctacatatctaaaacaccacggcgagcttagatcgtttagatttcgtagtactacagtagcaagccgagcaaactggtaagcgccttcagccgggctgatcaattacattagctttggcatttttcatgtattcccgagaagtttcgccgctcatttgactcttagaggccctcacgtcgtttgcgacaccaccaacagcttgcctacacgtggccgcgggtgaggtcggaggtgtccactaccgacgtaggtggagctgcagcagtgtgcgcctccgggagtaaggcagccaagcaaaccgcaacaaatacaaataccaagactggctgacgctgccttgttgctactacaaaacagttcatttcatggctttggtaagatcccatacataatgtattgaatgtttactccctcgcgtcctccgacaacgcctcggtgcggagcatgtgtgcgcgctcgtcgtgcattgtttcgctcggaggcgtcctcagaggacacgacagggttcgtgggccgcactaccggaggaagaggggctctatttggttatgcattaactagaattcactataaagccctgaacgttttgtttgtcaagctgggctaatggttcgggtgcatttatttcttaaccattctcaaacaagcgtgtacattgtagtcggcagtagggccgcactaccgactacatgttcgtgcttgtgagcgccttatttcgtcggctcgactgtaggtggcacgagcaattcaaaaacggcaaagcggttgtcctcgggttcctacatgctcaacggaggaacgcacgcaacgacactaccctctttcgtgcagtaagttttggccaatcgcatggtgcaaattgttgtccgacaaactgtcttacgttttgacggacaaaatacaatgtagccactggtatactaaaaccaagatgtagccaaaatgcgttgattgcaaaacgtaagacgctttgtcttacggtaggctctctggggctaagtatcgtcttacgaaagagcatgaatcaatattgtaccaatatcaatatttgccacaacatattgccatacttgcctttagtatggcgatatattgtactgtactagagtactagtatatgagtacgttgagtaatgttagcatgaatcgtcatggcacttatccccaatggtaagcgagtctttacccctaactgtacgtgtccgaacatgattgacggtcttcctagtgtctaaagcgaaagtgaccagacagaagcatcgacgagcaatgttagagactcggttggggtacctcgccctctttcatgacgtctgttgccaaggacacaagccaagttattatcaccgacgtaggtaccgcagtaacgctgcagctctgaggactaagtgtcccccctcctacgcatacgaagtcttttcgcacgtagtcgcagtatctgctcaaatttattacgtatacacgctggtgccattacgtggctgtaaagaaaacagaagtgcagccctgcggacctcaaggctactctcatggagaaaaccatagctcgataagagagagagcaagtctacgtaactttcgccttcgtacgccagcgacttgatcgaggtcttggcggggcatttccccgtgatttccccaaacttctccaacacaacgttcgtcttaccccgcacacgagtcctcactgagctcctggtgttttcgaccagtgccgcccagccggtgcgacatcattgatgcttcctccgttaactgcaggatccgctcaacccgcaccaggaaaatgacgacgacagttcggtacaaatggataaaaagatttgtcccaaagccgtcggcggtgagcgacaaatgggctagctgactggacgtctggcatcgttaagaacctcgaatactcaggaagcgatcgaacgcggcgccacggaaactgcagcttcagtcgcacgtccgatacaccgctcagagggagctggccaactcaactgggcgatgtagcattaattcggcgccttaataagtcgctcgctgactcgtcgcgaaacgtgaaaaactgagactcgattaagtactgacgatggattggggtctgatgaccagcgaagggctgttagattccaaaaatgtggtcaaaacggtccaattcgcagccggtttttcgttataggcgctcaaacatgaaggtttgaatcggccaagaaacatgagctcaagtgggctaggtcacgatagggctacgagaaatagcattctgtaattggttgatcttcagaaaacatatgacttttggagtagtcgacaggactaggtttccttgtcggacacgatcatgtgcttctttctcaccgaggctcaaaacatgcattaattaaggcggtcagaagtattcaataggcaacagccacggaaaaaggagaggaaaactagctcatagtgctctttaatatcgtaagagaaggtaggggcagtttttcttcctgaacaatattgacaataatagtggatattgatggcatcgctacaatacaatattgatgcccaacaatattacaattttacaatatcaatttttattttccgatccctgcttctacacactggggcgcccgtggactgcaactatcgcactgcataagtttgtggctagcgcattcggtatggctacgcttaatggggtagcccggtaccgttgtgcataccctcaggctgttttaaaggtcattagcgtcgacaccaactctcaggttgctatttgcgcgagattctacgttttccgtgttatgataacacggtgtggtgaccgtgttaccataacacggtaagacgtcagtgtcaccgtatcgtggcatcctgtatctgtttgtgcggctcagcctacgcggcacccctggatcgtcgtgaagtcctctactgtacgctcgtccgtacatagcggtttgtagtcgactgtggcggcgctgctcattcaaagcgagcccttcaacacagcggtaggcaaccctccctagaagacccacactagcagtactgcctgatgccgctcctttatcatacatgtactgcgctttaaaaatctccctaagctgcttcatttggagtacgagctcggacctgtacgcttgagaccctcacgcgtatccactagaaatgcatcgcaagcgtactgtccactctgaccgtatggatacgcctacatattttggttctggccaattgagaggcgctcgacccaagcaccaaagacatccaccaatcgatgcgtccgcgtctgtactttggcaccatcctctgtaaattgcctgcggctttctgtaatcacaccgcgccctctgtagatcatacacggtttctgtagtccgacccgttcctctgtacatacgctacttcctcctgtagattggaccctcgctcaacgccatgactaccaacgggattgtctgtatctatagcaagccgacttcgcgttattttaacccttaacaagggtgcgttgcgttaggctggaaggactactttaaattccaaaaagtctgctcgggtgtatctaacgttagctcgattttaccaactcgagtacaactatatttttcatactggcacactttgaagaaactaatagatttcttctttagttgcaaatgagggacatagcccctcatttgcagcgcctacatcatttttcttagggaaatttcaggaaggtgactcaatattaaaatttgtgcaaaaggtgatagaaggatttgtgtcgagagcacatatttcaggttcagcagcatttgctagggcattgggccacgacattgttgcctccagcggcgacatggggagtaagacatccaagccgtcggtgatactttatgcagcgtgggcagtgtcgcttaagcgacacagaaggcgaccgtactccaccagaacaactatcagcagagggccatgcctacaccggcaccgccttcgcgtttacccagtgctatactgacacaattggtgcattcagcgacgtgcatggcattcaggtgctggccgctatcgatggccaaatgcacttggcacaaaaccttgtatcaccttttgcacaaaatttcattgtgagtcatattccggaattttcctttttatatggagccaactatctactgccggcgaagctgcctaccggacagattttatagtttgtaggccaagagctaagaacgtaagcgtttgcagcgccgaccaccattttttatatggagccaatgatctaatgccagcgaggctgcccgaaatccaggcggacaggtttactttgtaggccaagagctcagctgcgtggacgtaagacatcctcagtttatccgtcagtaactaggaactatggaatacagtgtagttgtaggctgattggtcatcctgcattctcttgtcgctagcgctgtcctcatttcattgtcaattggctttgtgtggtaccggtcgggatgtcaatatggctatatttgtataggtatggtgtgcgtttgtgtgagtatggtgtggcgagatgttgtttaaatgttgcctgaggtacaagcaactttttttcgacgaattaatctgtgtgaggctgtccatacagctcttctagctgtcctcccaggataatacatgtagtggtgcggctcctgctaaccactggttaggttagtacagtaaccagtgaagccgcagccgtaatctaacttgtagttcggttgtcatcaagatttccgtgatacagtacatgtagtacacttgatttctggctgggtatcagcttttgcgttatgcccagcacttgtcaccctactttgcgttatgagtaaggtacatggctgcagccaccacgcttgcagtgaatgactgcggccactggtgatgctgctgatggagcccattcgagcaacactaacttgagctcatagggcaacacgcgcaacgctaacacacggcaacactaacacaggcaacgctaacacaaggcaacactaacacaggcaacacaaacacaatcaccgacagggaaagcgtaatttacgcatcgttattttgtgtgtcgacactacatgtgtaatacgggccgagcgctacgtgccggtgtgttctgggggataaccccagaccaccgctgtagaagaactaacgccgatgtgcggcatgagtccgttcgcaggaatgtgctggccccgcctcgacgaataccgcgcggtcctacttcgcgggcaccccgcgcttgtttgctgcggcaacgcgatctcgtaactgctcactcccgctcataaacgcaataatacaaagcaataagcttactagcctcaaacgtgtatattcgcttgaacattatcatacagttctgcatccaatctatccctatcggcgcaagacacgcgagccttcgtcagtgggcggcggcgacgagcactgcgtccgcaaatttgcgaatgagccacatgaagcaaaccaacgtttagattgaagtaaacattacggggcgcgtacaatacgccccatctcatatttatactgtgttaattgaggcaacacaatgatgggcagatttagcgttgctctaacgacttcgggttagctgccagctactagctggacaggctggagatagccatccactacactcacggttgatccttgagagtgactattaccaagcatcccacgatctaagcgggagcactgctcgcgggaacgagcacgagcagaacctcacgagcgcgctcgcggatctgtaactgctcgaggaactaccatgatccagaaaaagtactggattgcccagtagaaatgagctaagtgcgaatgtgcctcacacagtagaaactagtaagtacgcaatagctgctttcgaatgggtgggcctaccaaaaatagagaaatcacccgacatagatgcagcagatatgacaggcttaacacgaaaatatgtcgacatatcttaaagtttggccgagcaaactctggtcgatcctaatagtctcatttcaagtctttgatcacactataggacaattagtgcgggacactttggagctgaatctttccagatccgctagaagttcgcgaatagtaggcttgaagttcgccatttcccttcctactccctcctgtgcaagcgcgacaatgattgacggagacgacggcgtgatcctgcttctctacgaggcgtacaagacgcacacggagcgcgtgcgcgacgcccgccgcgacgttcatcaactcctgctggaggaggagtggcgcgtcgccatgcgcgagcgccactacctcaccacgcagtgtctcgacgcgccgtgtgcatccggctggatgacgctgtacgagtacggcactgacatcaacttcttgaacgctacgagtctgacacggtgagttctttgaaaggtctgtattatatttctattctaacactattgctacgagtacagtagcgcgtttgatcagttgctctgtagattatcttgcttctactacatgacgccacctcgtcgaaagggagcccacccaagctgcgctacttacaccatgtgctgggtctcgttcttaccttctacgtcgggtcgatggagcagagctccctatgcatcacctttggggccccacccagcacgctctccaggacgctgcgcaaagccgaagaggcgttagtgcgggcgctgaacggctacgcgcctgcgcgtatctcgtggccctcaccctcgtgccaggtagaattggcgcggatggcaacaagcgtgagccattgctcacccacacgttcgggtttatagatggtaaaacccttcgtgtacgtatgcatgctcttgaacttgccttttattttgtatattcaataactctaaacgcttttgcaatgtgttgtgtaggtgcaagagccttctaacgcagaccttcagaatgccatgtacaatggctggctgcactcggtcttcgtaaccggcacgatctgctttgcagcggatggctgcattatctggtctcgccacaactgtccggggtcgtggaacgactcggacacgtccttggagttccgcggcaagctgacggacccccagtactgccctgatggtcgtatgagcgtagtgtccgattccaccttcccgtgctccacggccatgacggggcgaatcctcaccccgttgaaggacggagatatcgagaaaattgagccttcactgcgcgccactgcacgcaccctacacagtgctatcacttccatccgccaggctgccgaatggggaatgggttgcgtgcaaaaggtctatagcagactcaacttgccgctgccctacgacccgaacctacgaggcatgcgcatcggcaacctattccggcttgcgaactacagagttcgcacagtcgggattccagagatcaagaccacgttctccggcgcgatggagattcccgagcaactaacgctgtcgtggtgtggatgaagtgttttgcatctccgttcgtagctttcacgtactagtgcaccttcgttcgtgcagcatgcacgttaatagctacaatcgaatacatgctgcaaatcctcgcaacaaacctattgcttgcgactaagggctgtattgaagatgatacgctactaaatgcacttcctccctctttcgatctccttgcacgctagagcatttgcggctcagtctttcttcgttagagcgcccagaatgagcaacagttcttgagtgcgagcccgagcatcttccttgtcacgacgggcgcgctcctccgcctcttgtttctcctgacggcgccgatcctccgtctccaatctcttgtgacggctacgctcctctgcttccgccttgtcggcaaggtagcgggcttcgcgagcagcaagcttgtcacggcgacgctgctcttcttcagcgcggcggagctcagccttgcgctcgctctcatcgcgcattagcagcatcatctcaaacatggagccgcccatgttgctggcgctgctctccaagtcggtcagacgctttttgagctcggcggtcgccctggcagccttcacgcgcttcgccttggcgaagctagcctccgagagctccttgtcgtcctcgagggcacgcttgcgccccacggtgtcacgaaagtcacccaagtcgatacctccgagtcggttcgaggaagtcgcgtagcctttcggcttggactccttcttgctcggcgcgcgccctttagcgccttgctgcgacccatacttagccttagcagcgctggctgctgtcgtaaatgcgccagcggcagctgctgctgctgctgcagcagcagcagtggggccttgcccgaccttctttgttgacctagagcgcaactttcgctgcatcgactgagccgacggcggaggagggcacggcgtcgcgaatgcctccagcccctcgcagacgccggccacgtcgagcagctccgacaggtccgcgttgcccacgctgtcaccgaccgacgtcggcgtctcgccggagtgcatcgagtcgttagtggtggtgcttccgcccatgtcagcgtcggcgtcttcgcgcgtgttgttcccgggcccctcctcatcctcgaagtcgaacgagaagtcctgctcatactcctcctcttgttggtcgacgtcggcaccgtcctccatgtcgacgacgctggccttgtcgtcgatagcttgtttaaactgcttcgccagctgcacatgtgacggtatgttggccacgcccgtaggtttgcgcgcattgtagagcaccttgaactttcgacggaggctctcgtggtcgtgctcggcgacaccaccacctcggttcgcgttgtaggagtttgcgagtcgctcccattcgtccttgccaagcgggaggtagtgttcgacgagcgtcaggaggcggcgcacttcggacaacttgtagttagtgcttccactcaacttcgccatctataatcaaagcaaatacacgaggttgtgagtgtcaaatagtaaccgtaggtgccaaggtgacgcgacggcagctttcatgaggagagcagcgtaccggaaacggggtaggaggaggtgagcggggtcgagtgggggtgtggacttgagctaggcttgaaaaaaacaataatgagagcgacaggagcttgatttcctctccgtcgccgaaggaggctccagcaaggcaaacacagtactgctacttgaagttggcgcgtactgcgttggcgcgtacagctactcgtgggcctagttggcgcgcaaactgagcgagctcgtggttgatacaaagattaacatagaggcaaatagcagctcacagcgttcattttggcgccaagttcacggcgatctctgctggcacgtcaacaacaaaggcaaggcacaagggatagatgcacttcaacgcagttagattcaacagcgaaccagatttgaatacaatgtccttaccaattgctgtaaatctcccactacttcttcttgacttcaaccagacctcgaccttgagagcgccgcctacgggtcttgctcgtcttggatgtcgcagtggcggcaattcgcgtggccacagcggcacacgaaccaaagatccggtccgtagtccacggtaatctcgtctccctcgtagatggcgtgcgtggtgaccaccacgaccgtggtccgccgcccattcgcaacttccaagtagatagaaatgtccactttgatccgaatatccaaatgcaaagaccagatacccgtttatcaccatgctgtgcgtactgtcgagatgaaacatggtcgtgcactgggaccgactttgcacgtccacatagtctcggacgagacgaagacaggtcataccaacccggagaggatactccttcgggccatcaccaatatggttcattgtaccagcagccccagctcgagaatcgggctgggtatcacacaaaatcaccatctccatatctgatagtctccaaattattatacaaatgcgcattgcaaaggtcgatcatgggctgcatggagtgctttgggcggtcacgtctgtagtttttcacaaagtcggctacctgctgatctttaggagttggcccgatcatctcaccatggaaaacttttgcacagatgcctgcatacaacttggacgccgtaggtttcccaccgctgtcgaggctcgtctttatgtagtccttcatctctgcagtaagtgcacgtttcggggggggggggggtcattgatgtccattatatgctcgccctgctagaaaacttcgcacgcaccggacgacaggcaggatttgaccttgtagcgacacaaactagacgctgcgccgccttcctcctgggttttgcaccgcttagatcgacagagaaccattcgagacttcatgtcgcggctagtctgagcaaggctgtatctctatcagacaagtggccaatagtgcagccaacttgtgtacatttgtcgatacaaactgtcggtagagtctttcgaaaatcttctagagctccagacgctttagatttgaagatcttcgcccatggtggccgccccgtttgttcatgctcagtctcagcttcagatgcggacgtccccagttgcagctctatgtggtctccatcgtcggacggtcactcattgctgcaaagtgctaaagtgttgaagtgttcagcagctcttttgtatggcagcctatttatgtcttggtggttatgcctctatttgtgtgtgtgtgctcccgaccagaatgttggtggaacttcaccttttttgggcagtctgactttttttataatggccgtaccactcactcgccacgcgagcgccggcgtgtggcatgaacgccagcagcaagaaaggagagacgttcctactgcctaccgcaaatcgcatgtagtgagctgcaccctgatattagccaattaaaaagcattgagcagcagtccctgaatcgcatgtagagagatgcacaagccccaaaccaaccaattagccgcaagcctgacggcaccagcattgtatcacagacattcggcttttgccatgacgcgcgttaagccgcgccctgtgggcagaccgcgcctcggaggcaaggggcgccaccacatgaagcacctaattaagggtatttcgatggagaagaagctgacagttctcgcgttctgggcatctgcccctctacccaagatgcgcagtactattgcgcacttctggccagaactagcgccggaacgctacaattccaagcgcaccaagatccagcgctggcgaagggattcagccaagctcgaggcagctctaaaagggcgtaaaggtagccatctaaaggtgcgaagcgttggggtagggaccattctctctgaatctgttgagctagagatcgtagcatggattacccgtgtcgccccgaatgctaactttccaagctcagcggattactgtggaggctggtgtcgcctccttcagggcgtcggacaagttttttttttaacacagctaatttaaatgtgtgtatgtatgaagctgctttctttgaatatttgccaatgaagaaaacaatcaatgcccgtagtgctaaaacggtttgggtcaagtgcgcggggtcttcaaaagaacgggcaacaatgatggtgttgggggacttgaacgggtcaagcacacgccgttcgtcgtgttcaagatgaagccatccaagaacaaggaaactgtcaaggccaataacgagaagcgctgtggattcggtgttcggacgtggccgaaaatcaagcgcatcaaagaggaaacaggactgcagatttacacgaacgaaaaaggtgggctcatgctgtgaagtcattgtgatgggattctatgatactaattttgatcatggtttggttttgtatgctaggctggtggaatagagatctttcgatacgatttctaaagtttcactttggcaaccggtcgttctcagaggaacccatcctgcttctctgggacgacgttagcggacactggacttcggaagtgcttctctacgctgcttcgatcaaggtcgttttgattaaggttccgccgaacgccaccgccgtctgccaaccggcagatgcagcatggaacttcccattcaagtgggggctccggcagctgtggctcgacgacatgcaggcgcagctaaaccagccgcgcccagagggcgagaagttcaagctggaacctccaggacgtgccggaatgtgcaggtgggtgcgccgtagctgggatggactaagcaccgacactattgcgaatgggtacaagaagtgtagtttgcagctgagcaacgagtgcctcgccgcggcgtcgctggtagatgagctgcagcaactttcgttggctggaccagttgtggacgctgaccaagacttcgaccgcattatcgaggaagctgtcgtgtaatgcaaatagatcggtgttctgtttttatgagtcgtctgaatattgattttggaaggttgtatcttgctcatgaacattgggtgcagctcactacatgcgacttgcggtagtggtcactgccaagtaaggattgcctacgacaagcagcgccaagcagcgcacgtggcgggctgcctgatcgcgtgcgcacgacggtatgcacgcgagagatcgcgcggcggcgggagggggctcaacagagcgtgtggtggccgtgctggagagctctcgatggcacgcgggtgcttaagtccctgtgcgcgcacgcaaagttcgtggtgctgttattgcagcagagcgcgccctcagtcgagctgagctgtctccgcagcatgcacggctccgccatccttggtggtgtggcccacacgaccttctattcgattaaaaagttccaagctcctgggaatacctgaaaccttgtcactaaaacgaggtaatattggaacatttttcgcggtttcaggtaaaaaaatgagcatgctgaaggatattttccctggaaccgcgaactatcttccaggtttcaagttccaagtgtttgctgaatggctctctcgaaacgggagacgcagtacactatcgtttcttttaactgcgtctccccgggagtttcggggagacgtaaaacctcgggagacggtctctcgaggttttacgtctcccgtctggtgagccgcgtctcgtccgaggggtgcaataaccacccataccgatgccttcatcatctcggacgtgagcagccagcttatttttaaatgcttaaaagttaaaccgcaaagcccaccgcgagcataacgaacatctcaattccagagagaacgccgccgggaagcgcaccgttattggaggtggcgttcagcaacgcttgcttgacgatcgagtactgcagctatcaggggctttatatcaccctcagccacggcaaccaacgacacgcacgacgcagctcgtccgcgtggctctatctacgatgaacaaagtacaaaccataagtcagttggcgctcgaggattaaatgcaacggcatgaagttacctccaagttggaatcggatccagccttgctcgccacgaccttgatcgtctccagaatcgcctgcaaaaaagccattcacttgaccagatcaatacaatggcagttcagaggagaaatagtacaaaaatcaaacttgtagttgtaccttgacagcgctcgattgaggtgacccctacctagtagcaacttattgccacgcctggtcttcagctgcgcgcatctcagcactccagttcttgttcaaggctattgtggtggggtgggcattgctggtcttggtcttggtggagactctcgtccgaaccgcgacaagtacatcagccattctctgcgtgtgtccccacctgctctgttcgtggcggaaactcgcggccagcgaaggtcgatcctaacgtcggtggaccttttgcagtgtgcattgcggctcgccacttctcagtctctgcgcttgatctccgagtgttgaatgttaaaacttttaacttaaaagttgcgccttgacccccccccccagacgacccatctatctctctatcagcattttgctgaacacacaacactccaacctgataagttaaatctaatactagtagtactcgagtcatagagtcatagagctgacccgaaggccatttccacagcgccatcagatcccgaaggcgtcaggcgtcggcgctgcagaagtttcctccgggtcaaatctgcggcgtcatcaccatttgcttcctgcaacctggtgtggcatcacacagcaatgtggctagccagcacctcgaaacctgtcatcctcgatcttaacaaacttatccgtcacgtatccggattcctatcatacaaacgcccacgcttccaacctgtcccccatctatctggtcgtcttttatgactgttgcgctgcccctcactcgctcactctcccatcgggcagttcaagctcattgcacgtgtccagcggcggcgactcgtacagtagagagatgaagctgctctgggcgctggcggcgctgctggccacgggcgcctcgggcgcggccatcgaccccaaggacaagggcgagccgctgttccccgacggccaccccaacatcacgtacctgacggacaagaactgggacaagcacatggccaagacggacaagccgtggatcgtcgacttctaccaccccttgtacgtgcacgatcggcgtccggtcttgctctccgtggtggttgcattggaatgcagcgagaattgaccgagttatgatactttttgtggttgtgatacactacgttatgtgatacatagctgcccgcactgcaagcactttgcaccagcgtacttcgagctggcggcgtactacaaggagaagggcaacatctacgtgggcgcgctgagctgcatggaccacgtcaagtgccgccgcgtgggcatcacgggcttcccgacgctcatgacgctcaacttcgacaagaagaaccccaagatggagaacaagcgcatcatcggcacccacacggtgcaggaggtcaaggactacgtcaacagcgtcttcgccgaggccgcgttcaatgagacgggcacctggccgcccggatacacgcctcctgagaacacggacaaggctaaggaggaggagaagaagcccgaggagaagaaggacgcccccaagaaggaggaggccaagaaggagacgcccaaacccacggagacgctcaagcccatctgggaggagtcgacgctgcccatgaacaagacgacgcgcatccaggacgctgcgtcggcctttgtgtttgggcttaagcagggcgcgttcatggcgagcgatgtcatggatgatgaagagtttgacgcactcaagggctggctcaagatggtatcggagactttcccaggtgccattaaccgcaaggttattcgtccgctgtacgagaaggtgaaggaaaaggagctgctggactttgacacgtgggacgccattatcaaggagtggcaggagggctcagtcgccgccttcgacgcggaggaagctcgttttgatttcactggtgtcacggtgcctgagtggcagcggctgaacaacctgttcctcggtcaaggcgccacctaccgcgcgtgcgcgctgtacacctgtggtcaatggaacatgttccacatgctgacgttgaaccctcccgagacgggagcgcgcagtggtgagctcatggtgtccgtggtggcgtcaatccgtcgctttatgaagcacttcttcggctgcgtgaactgccgcgaccacttcttggcggagaacacgatcgaggccgtgaagaagatcaaggacgcggaggacaagccgctggcgctgcgtcgctggctctgggagcagcacaactcggtgaacaagcgtctgcggcacccgatctggcccaagcccgagcactgtccgacgtgcggcagtgaaggtgcgtgggaaatggtggaagtggacaaatggctgggcaacacgttcggctaccgcgatgtggttgtccctctcgcaaagcctcaagtgactgctccgttgagcacggccgccgctttgcgtcgtgaagtgaagaaggagaccgaagcacccgccacggagcaggtggagactgccgctgagactgctgaggaggctgaggaggacgccgcagtggagaagtccacaccgaagccgactggacccgtcctactcgagccgaagggcggagacgagtaccgtccgaaagacgctgagctcggcatcaagaacgccgcgaacaccaaggagctagtggccgacacgaaggccgagcccaaggacggtctccagggtgtcacggcacctcctgtgacgctcttcgcttggtacatcctccccgtagcagccgtaggcgggtaccttctctttgtgcgctctcgacgctccaagcagaaagcgtaccgtcaggttccccgcaaatgagtgagttagaaggaggaagttgaacacgcgagttgactgcattgaaacttagaagcacgttcgagctcaactcaccgcagctcagctctgtcaatacgcgcagcttcaacgcgctttgtatgatttacgatggctgtcttgtggtgcatacattttcattttgaagttgcccgtgagtaggcacatcgatttttttttctaacaagagtcctatgcaaagtctacctaacgcttacgctgacgtggcgaggcgctccgtgcccgcgatctcaataccgaatccgttggggtcgaagctcaccttggtcgtggacagcaaccgcacagagcccaccttcaagtcgcgcgcgacttgcatggccatgccgaagatgctctggtgcgccatgagctctccgctgatctccagaagctgcgccgagccgtgcacgtagatgagcacaccaaagccgtgacgcgcgatgtggtgctgcgcccactgggcctggagactggcctcgaagccgtcctccacgaggaacaccggcacctcggtcttgccttccacctcgccgaacaccaacgcatggtacgtctggttctcctgcacgagcgacttgtactcgacgctagcaaactgtcccagcggggtggcgacgctcgtctccttgggctgcgtgcgctgcacgagcgtctccgtgcgcgcgcggtaccggatcaagtcggagatggtgatgaggggcacgtcgtgcttctgcgcgaacccctgcagctgcgggcggcgcagcatgcggccgtggtcgtcgttcatctcgcagatgtagcccacgggcttgacgccagcgagccgcgccaggtccgtggcggcctccgtgtggcccgcgcgcaccatgacgccgcctttctgggccagcagcgggaagatgtggcccggccggttgaaggcctgcgcccccaccttggggtcggccagcgcgcggatggtgcgcgcgcggtccgcggccgagacgcccgtcgagttgccctccttgaggtccaccgtgaccgtgaacttgcacttgtgcacctccgtgttgttctccaccatgagcggcagctgcagctcgtcgatgcgcggggccagcgccggcacgcacacgatgcccgtggagtggcgcagcatgaaggccacgcgctcctcggtggcgaactcggcggcggcgatcaggtcgccctcgttctcgcggtcctcgttgtccatgacgaccacgaagccgccctggcggatggtctcgagcgcgtcctcgatgggcgtcgtgcccacgttgttctgcgcgccgctgaaggtggtgccggtggccatggcgacggacggggagtaaggggcgaggcttgagctggaagagggcgatgtagcaatgaccagccagacgggatttggctctttgactgacgttgcatccgtaatcccagcgacgacggaatagattgcgtgccatggcactaattggtatcaattgccggaggtcgtgcgaagcacgttttgtattgggtgtcctttgagaccgagaaggcgataaagaaggtgacttatttgtagagggtatggaatcgaagtgattggtgcaaatcgggcttgaaattgaccaatgggcgcaggcgagtgacgtggctggcgccgggttgacgcaaacagcaacgtgcaggtctgtcccaagcttttgcgatgaccagcatgctgatgttgcaccttgcgcgcggcctgcaacgcggattgcgaagacatttttttggtgtccgggttcgctgcactccagctcgaagagtctgcacaaatacaaatatgtatgtagggcttagctgttcaacattgactctatcgggtggctaaagctctcctatccgtctacgccgggagaagttagggagcaatggactcgggagcattggagcagaaacctgcagcacatggcgttagtgcttgtgcaaagtacgcccagaatatctttgcttgaaatagttccgataaggctacgaggaagcttgagctgcgcattgcggctaccaagaccgagcagttctcttcgaccttcttcacggccaaggcatggttcgtgtcattcaacccagcacacctttatcgctgacatcgtttctggaaacggcaacgagtggacacggaacctcgcccgcacaaaactgggcacggcattgacagcacgcgacgcgagccgtcgaggttcgagctgatcgagagaagcctcgaggcttctggggtaagtatggccctaccaacaatgtcttatcaagaattgcttcaccaagacgacgaagagttccaactagcgttcctgcgccctcgcgcgtgggggcaggctgggctacgggaactagacgattaaattctgtatatgtacacttcctgttgcattgctgatctttgcgttgaagttgctcgtatggtgagtagctaacgccatgtgctgcgggttttctcctccaatgctccccagttcattgctccctaacttttcccgtctacgccgacatcgctagacgctcgctgccggcgatctcaatgccgaatccattcgggtcgagacccaactccgccgtcgtaagcagacgcaccgactcaaccttcaggtcgcgcacgatctgcatcgccatgccgaagatactctggcgcgccatcaactcgccgctgatctggagcagttgagacgcgccgtggatgtagatcagtacgccactgccgtgactggccacgtgcttctgtgcccactgcgcttgcaactcagcgtcgaagccgtcctcgacaaggaatacaggagcattcttctgggcgctgacgttgccgaaaatgagggcatggtacgtttggtccttctgtacgagcgacttgtactccaccgacacgaaatcgccgaaaggagttggcaccgtggtcgccttggcttcggttcgctgcaccagcgtatccgtacgtgaccggtatcgaatgaggtctgagatggtaaccagcgggagctcgtgcttcttggagaactcctggagctgcgggcgacgcagcattcggccgtcgtcccccatcatttcgcacaggtagcccacaggcttggcccccgccagtcttgccaggtcgatcgccgcctctgtgtgtccagcacgcaccatgacgccgccttcctgtggaagatgtgaccaggccggttgaacgccgcagctccgacctttgggtcagccaaagcacgaatcgttcgcgaccgatcagcagcagatacacccgtcgagttgccctccttcagatccaccgtaacggcaaacttgcacttgtgcgcttccgtgttgttctccaccatcaagggaagctgcagctcgtccaggcgaggaggaagtgccggcacacacacgatgcccgtcgtgtgacgcagcatgaaagccagacgttcctccgtagcgaactctgcagctgcaatcaggtcaccctcgttctcacggtcttcgttgtccatgacgactacgaagcctccctggcgaatagtctcgagcgcttcttcgattggcgtggagccggcattgttcatggtgggggtcttgacgccgttcgaggtggcgccagtggccatcttgggggagtgtaattgtcctccgaagcttgacgatgtgaggtcgctgacgaagtttgggaatggtgtcatccgaagggaatttgtgagctcttcgactgacgttgcagtcaatcggatccgtgtcacaaagagctgcgaagcagagtcgcgattggtgcaaattctatccaatcaaaacccactcacgtttaccacacaatattacgtatgatttgtgtagcgtcgtcatcaaccagagcctcgacgccaaatatcggctcatcatggcgaggggtctgcgcatcggctccaaggcggacgtgctcaagaacctgcgctcgctgctgcgcgtggctcgcgcgcgcggctcgcaggagtccgtgggcgactgcaagttctcccagcagatcctggcgcaggtgcgacgtccgcgctctctcgtccactgtccgccgcacgctccctgactgactgatgtcatgttcactgcagtaccgtgcgcgccagcacgagaacgaccgcgccaagatgcgcgcgtaccgcgcagaggccatcgactacctgatgctgctgcagggtatcgaggagcagcgcgtacgtgggaatatcaatcaatgcggtatcaatgtcaaatctgagtccgacgacacacatgtgtcgctttgcagcatctgtgggcgctggatgctggactggagcagaagctttcgggacacgagatcgtcaaccgctcagcgcgtcgcgtgggcctcgaggtgcccgagatgtacgccgagaagcaggccgaggaggagcgcaagaagacggcggcggccaagtacttggccgacaagcaggcaaaggaggctgcggggcagtaaaagtcacacgtagtgtgcttctctgccgggaggtcgctggtatgcgagctgcagctcgtatagactggctaggggctgttgcttactggcctgttgtacacacttcaatggcaccgcaatgttgattttttcaagcattttgttgatgagataagcaaaattaagacacaaggcgggaggccgaggacaagcacaagcgtagaaattgacaccggcaagtttggcggtgcgtctatggactcgcgtcaccgagatcgtctcgggacgcggcctgctctgatgacagcgtggtgagcacgacacgaccctgtcggatgtccatgatgaccaggcggtagtacttgcccttctccgacaggacgaggagctccgtgggcgtgatgccgcagatgacggctgcatactcgctggacgccgggtagttgagcacgtatacctcgtcgccctcctggaagatccagtcgcggtacagaaacttattccggtagtacttggccacaggcgtgatctcgccgtctgaacaatgcacatgacctcatcagtgctggcaatgactgctttacgatacaggatatggggcgtaccggtgtcgaactccatgcgccgcttcttcgatgcctcgtagacgtttgtaagctcgcggacgtcgtggtcgatctccgactgacccaacttgttctccagcggctgaaacacatagccagcacgcttcttgatcttctgtgcggtgtcgagggcaacgttcgcgtccgagccgtttttattgcgggtactgcgcgtcttccgagtcgtcgtccgagctgtaaaatagacacaaacgcacgaacagtcagaagtatgaaacaaaagctgacacgtgcatcagatgccaccagatccttacaaaagctgtgccctcccttgcgctggtcgcccaggatctccatctcgtggtggatctcgtccagcatatcctgacgcagcttctcacagtgcagttcatactccgagttggcctcgtcgcactcgtagtcgaagatcacagtcgtgccgtgctggaagtagtcgctccgctgcttggccactcgcaggcgccggtcgcgctcttccacgagcacttgcaacctctctgccatatccggatgggtctcatccaggatcttgcgtttcgcgttctccacgtactgcatctggatctgcagtcggcgcttggccctctccatgagtttcctcgtcgtctcggccgcgctttcagcattgcgcggggccgtcgtcacctctgcagcagctgtagcagacacatccttggcctttccattggccaccacgtcgttctgctgcacagaggcctcctcgtggctcgtatccacgtccataggctctggcgttgcctcggacgcaggctccttggtgccgttcgctggtacagctaggggcttcactgctgtgccgggtgtagccatccctgattggcggggtgggtccgccacgattgtcgacatggcgatttgttgggctctgcaacgtcaagagcaagctcggagtgctcgtgaattgcaacgagcagcgaggtggcgcctgttgtggctgcgggtccactgggattccgctggagctctcgagtgcgagaaaagctgcaccggaacggcctgcgcaatggcggtgggtcgctgggcaatggattcaaagctccaattggcactgcgggtggtcgtgaagcctgcgcggagctgcgggcgattgcgggggagcgaggggcagcgggagcgcgctgggggccttcgactcggttcttgctctttcggcgtctgcttttcgactgagagtctcgattcgactgtttcatacaggagtggagcttgacttgggttcagtaagtggaccgggggtggacgatcgggcggacaagcggaccgaaatggtgtgtggtacatattgatatgtcgaacacataaacagctggtagtccgcttcaacacgctgaagcgctacttgagaccgggcagaggccgcggacgcgtcagggcgcggcggcccgaggcctccagcagcgtgcaaccgactcgtgtcgcatggtacgggatggtatgggtactaaacgcttggggtgtcgcggtcaattggtcaactggggtgttctgcgaacaggtgccacccactttgggttaaatggtgaggtctcaaatgtctagcccgggtaccataaacccagggctggaaatttgagacggattctaggtttaaaaaatcctgtcaactgatgcgaaatagtttcaatctgaacactaacgcaatgccaagggctccccgctgccatgcttaatgacgtttgtgtatgagtgagtgagcttatcctgatcaatactgagtcgagacagctgtgcttcaaccgaatcaacatgcaggcaatgcctgtatgtatccttgagacttgaggcgggccgctgccatgtctgcaacgcgccaccgcgatcgctgcattgaactgaaacgtgtcgggaaggacattcggtgattttaatcaggttttaaaaaacctgattcatggcctctgtgcgtgcagatactgcagttttgagtgccaccggcggctcggactatagataacaacgatgggagttcgcctggcagaacagagcgagctgtcgagtctggtgccgggacgaacatgtccccaaatccttttctaaaaggaaagtgagtcccgcgcgacatggctgcactgactcgaatggccagtggagctcagttacagccgtcggcggggggcttagaagcaagggcgtgctgaacaaccacaaccaacaacaccagcgctatttcataaataaagcaaagcctactttttcctatctgccagtgcgtgaacgcgcccgtcgccttcactcgctttgctcggtggtgcattccttggctttgtgccacgccgtcgccgtccgtttacaaaatcatctccatttcatcctcatttcacgcgagcactgccgaccttgaagcgctctctaggaagtcacgtaggacgtgttgagcttggcgccaatcgtgacagcaatgcgcgagaatcgagacgcgccgcgcttcaaaacctccggcttgtgcttctcgtaggcggcaactgctgtcagcaacttctccgacgcacccagcccagtcatgtccggtagcaccgacttgaagttctcgtcgaccttggacggctccgttgcacccgtcaccgcaggggctgtggcctcaaccttcacggcgctggtcgcagcggtctgacctgctaacagcgcagaggcatcgccaggggtcacggctgttgtcggtgcagtgccatttactgcaggcgtcgtagcggttgcagccgcaagctcaggctttataggcgtagccggagtagttgcggactgcgctgccgttccaatgctcaggcccttggcttgctcgtactcctccgccagtttgcactgcaccaactgctgcgagatcttgttgatcatctgcgcaaggcgctgggcctgctgcgcgagctttgcctggcttgccggcgttttagctcggctttgctgcatgatgagctcctgctgctgctcgcgcaacttagcatgctgggccgtcaactgctgcttgcgcgcctcagggagcttaaaagtgcggtattgagacggagtcagcgaggccatgccgtttatcgcagtcgtttctccaggagtcgaagctgatacgtcaataggcgtctggagagaggctcccaagctggtaggcgacacgcccgtacccgctgtagtcgcagcaacaccatttgcagtggccaacgccgccgccccggataccgctccagtctgttgcgctgccgcattcattcggaactcgttctgggccttgagttgcgcctgctgctgggccagcaattgctgccgttgttgctgctggagaagagcttgctgctgagcgtgctgggcttgcagctgcttctgcttttgctgacgctgttgctccagcatctcttgcttcttggctgccgcagctgcagcggcctcgagctgcatcttcttcttttgctcctcgagcaactttcgctgagcttcggccttctgctgctcttgcatcttcttctgctgctcttgcagctgcgcgagccgctgagcttcttgagccttcttcaattgctcttgctgagtcgccgcagtgccgttggcgccacccccagcggcagccgcacgagtcttgttctttagacgctccagtatcggcagcacttgcttgtgaatgtgagcttcgactcgatccagatcgttcttgttgttgctcgtgaccttcgaggggtcttgctgaagcagcgcaatgatgcgcttcaagttcacgaggaaagtgttgatgcgctcctgctgctggttcgcaggcttctgcttcaccatgcgctcgaactcgcggtacacaatcaccagatcatcccagtacttctgcttcatctccttcagtctctccacgtacgtctggttgttgtttccggtggtagtggtggtagctgcagtcgtagtggcagtcgtagccgaagccgtaggagttgcagaagccgtggctgtagtgccgttcggggtctggtgcttcagagcattgtccgcgtgcaactgcgtcgtattctgggcgcgctgcagctcgcgcatggcagcttgttgagtgtgcgcggcggcaagttgttccggattcactccacgttggagcgctgctgcagcctgcgtcgtcggaacggtaggggcagttgtttgcactgtcgtcgcattgggaagcgacatcgatgccgacgtcacgccggcttgcgttgccgccatcatggtggtcgatgcagcaccatttgtggtggccgcagtcgacgtcgctggcagtgtgccttgctgctgttgctgctgctgaagctggtgttgcttctgcatcaagtactgttgctgtttgcgctgtagttgttgctgcttgctcttgtgcaggtgctgcagacgcgtgcgagcgagctggtgctgctgctgcaacgtctgcaactgttggcgacgcaggtcaggggcgacaccctgttgctgctgctgctgggtgagctgctgctgctggttcaagtgttgctggcggagctgctgcgtctcttggttctgcgtgtgcagtagctggcgctgctgggcctggaactgcacttggatacgctggagccactgctgcgcttgctgttgcggggcactggggatgctcaccgccggcgttgtcccagctgtggtcgccgcagtgcttgccacgttcaagcccgccgtcacggcggggtttaaaccagctgaggcggcaatagctgcagctttagacgcagcaataacattcgtctggacctgagctgtttgggcttgagcctgagcctgggcctggatttgtgcctgggcctgagcttgagcttgagcttgggcttgagcctgagcttgagcttgagcctgagcttgagcttgagcttgggcttgagcctgagcttgcgcttgagcctgggcttgtgcctgcgcctgggcttgctgctggaagttgttcatggcttgactcacgttgttctgctggaactgctgcgcgttcatgttcatgttcatcgcagggttcataccattagcagcgccgttcatggcgttggacgtccccacgttgctggcgttgggcatcatgttggcctgctggacctcgcccgcactcggcttcttcttgagactcacgatcttgcgctgcatcttcatcaggtacgagttctgtacccacgaacacagcacgcacaagggccacgtcagcacagcctccctcaactcacacttcaacagctcagtattccctacccggtcggggctgctggaccacagcatcagctcgaacttggcggccgatccccacaccttctgcttgtccacctcgcccgagatacgcgccagctcatgatacctacgcgagcagcacaaggcccacagtcagtctctacgacacaccaagcgggcttatacgaagccctggaaacaagaggggagggaagggggcagccaggtgagccgtttcttggctcggccccctcggacgcccccagaccacgcagcaagcgcgcacccagcgcagcagaccgagcgagagacgtacatttccgtgatcatcttcttgcgcatgtcctcggcgatctccgagcgccactggccctccatggtgcttcacttttcggctccaaccactcgcgcactattttaggcgcttttggttcggcttgggggctgtgagcgcgaggccgcaaaagtggaagtgagagctgggcgacgcggggagcttgtgatgggcttctattggtcgaaatacagcactttgacaccttctcattggaggaaagtcaggtcgaaacggatacgacagttgaagagcacgggggcagcactgttctggcaggcgacggtactgcgcttcacaaccgtgaggagtcaactacaacaacgctacgctcactccgcttggcgcgctggctggaccatccacgaggcgacggatgccatcactttgtgcgttggaacgcggtgatcgcggtcgataatcgaggagttatatagtattacatgtagtgcacaatgcggtgccaccaccggtatcatatctttcatcgtcttgagatgcagacaatgggagtgcgaggctgcacttgagccgtccggaggagaccaacgagagccctctgcaacgtggcgaagttataatagctcctgcacttgactctatggcgccgctggtggactggaatcagcgcaagaagcctataatggccagcgcgatctcttcgcgcgccggccacttggtgctggggaaggctgttccgtgttggtgcgatggtgagaatcaatggagctcgcgttcagctgcaaaggaacggatctgggctgagccgtcaagagagctcacgcgcagtttgcctgatcgcctgcaagcgctgaacgcgtttcttagtccgatgtgggccaccgagcagctcagcaacaggcattgaacaagttgaagcgcgtcacgctaagctctatatacagcggcagcagctcgaatcaatctatcatggcaccaaagttccttgccgctgccgtcggcagatccttcaagttcgtccccacattttaacgtcgaggcttctctcaggatttgtcttcacggcatcgtaaagctttcgtggggtgcttacacgttgcagccggcgacaaagcaccatcgcatcgctgcactacagcagcaacaagcaaacgcacaactcaaacggacgcgtacacattgcagcaatgccatttacgcgctcctaaataccgtatcttacttccgtcctctctcttccgtctccttctcctcgctgctggatctggttgaagcaactgccagctactgcacgttcaccgccgacatgacctgcgtgatgtcggcccatggctgcgtgaagagctcgacgtcgaacttcttggcgttggcgcaggcgccgctgttgcagcggccgggcgtggcggtctcacagccgcgcacgtggtagcggaagtggatgccgttgacgatctgctgctcgatgcccgtcacctccgtgaagcacaggcgcgacttgagcgactggttctgcttctgcttctgcagcgcctccgtcagcagcctctcggtcgccgtgttccgcgtcgcaggcatccactggccaacgaggtggtaggtggcagcctggctcacggtcagtagcgccgctaggacggtcagcagaacgagcagcagattcacttggcgcattattgtgctgtttgggcttggacttgcagcgcttggcggtggtgtagcttgtgcactgcagcgcttgttctcgaatgagacggtggagcaattgaccgcgtaccgcttcgcgcatttttggatcctgcatcacgtcgcaggaacctgtaatattcgataagtggtgaactatgcataaatgaaggtgtagagcgtagtatagcatgatgaaaaagtgtagtatacgcgcatagttttgtgcatcaaggcaataataaagggttgggaagggtccttggctatacagcatgagcacaaagagaccgagatctgactaccatcgcgactccacacgatagccaccgcttgcttgcctgctcaggaccgtacaatttctcgtgtacagacgcgatctcgctgcaaaggatctcgaccgcgttgagtccaaccgcgcttgttcgcagcgcgtttagcgtccaaccagcttgcagggcacaaaacgagacggcattctatcctgatccaagctcgtgcgccttctaaggtaactctcaccaaccgacaaggttattgtattttatcttagagcagcagaggtcggaacatccgctgtgcacggataccgcgagacacttgggatctacatgaaatagcaccgcagctttcagggctgcgtgtttctttgtttgaacctttcaggttcgctcacagtttagctcgtatggggcgccacggaagtgacctgcagtgtgttagtccacggttgcgagaagatgacgacgtcgtagtcggatatggcgcactggcggtccacgctcgggccgaggccgctcgcgtcgttcacagcgcatccagccacttggaacttgtagttggtgccggccacagtctgcgtccacagtccttcgacggcgatgaggcagattgctgcggtcacgcccggtgcgtagtagctcgcgttgctgggtcaatagctgcacgtccgcgtcggccacgggggcctctttccacgtaccgaccatcgtttgagctggcacagcagtcaggagggcagcaccaatggctgcgggcgcgcggaggtagaccatggttggtggtagagttggtaaagtaagctgcttggagcgttagactggaacttggaaagtgagccttgtcttggttgatatctgccgtcgacactctactataccaccgtggctcctctcaagctgcggccatgtgggctgctcgcctgcaggtgttcaggtggaaatgcgcacgccacgatgccacggctcgctcttcgctgcacggtggtttttttcgggtgcgccagccagcagggtcatcatgtggcgaggtagtgccggcttcagataggtggacacacgttttggtaggtggcccagtttggattcataaagcaggtggggcattgatgttattctggtcagccagcaacagcattgagcttgatctaacgtgcatgctgctggacgtacatgaaacaggtgcattcgtgcacggattcttctgcacgagggcaggttcgaacgatctaagcgctggggcctggttacttgtagtttttgttttgttttgaattgaggatcattaataatgattcattattggcacttaactaatacgatcgctagcgactactaaagactgtggttactagtagtgggaaccagattttgctgccagtggcaggtcttgtccgttgggaaactacaagtatacctccgaacgcagacactcagacactgttagtgggtaagctctacatcatcttattgttgtcgttttcatttaacatcaccttggccgaattacctggacggcacagtcactgatgatctcaagatccgacgcagtttggcttccggtcgcacctaagctttcaagatggattcaggcgccatggctattgctataacacgaagatcagacggcgacctccggcattggcgggatgcatatttcactggaggggctgaagagcctgacgcggacgccgagtaaggaagacgcgacggaggcgatacgcaaagtaggagccccaacctgaaggtgacgattagcatttgcggggccggtcgttggagtcgttaggaaaaactaagtgacaacaatgtacctcaattaaaaaaaatagagcacgaagatcaaacatcttcttcttgtccttataggaaagcgcaagttcgtagcgagtgtgttccggttcatctgatccaggcgactacttaagtatactgattcaccgtaaatccgcgattgtaatgcaacctgaacttcggtctggagcagagcgcgtggacggtctgcaagctgaattgctgaatgaatactgttgtgtacatgacccctcaaaatcagattcagtaactctctttgtttaacaggagatcccgctaagaagggaacaaaaagagcccaaaacggtgaaagtcgaaaaaaaaactaattgcggttttagtgaagcatgcatgcaactggtatcgttcgccagttcgctatctcaaactaaacactatgctaatctaatgtaagctatctgtactatctggcaaccacaggcgctgcaccaacgcgcctcgagtgattgccgtgtgctctgtgaaccgattttcaaaaaattgaaacacggttcaagagcggggcagcttccccccaccttccctcccaccaggttgtatcaaccgttgatcgcgaagtcggtcatcctgccaacgtccttggaaagcagtgacttcacgtccgtgttagcgcccatcgcgctgatcacgtcgatcagcacccttaagggcctgcaacgctctcttaccttagctatgtaacgctgctgcgcagctcgcgagttctactctaattttccgagcggggcggattgaatcgatggcaaaccgccggcgaatcgccagagcacttgggttgactatggtcgcccggctatgcccccttgacacctactaagtacggattgggcttgacatgcggtcacagaaccattgtttgttggccggcgattcggcaaatgacttgatgtttgtataggtcggttggacaggtgccccaaaaccgacccgattcggcaaatttggccggaattcacaataccatgtaccaaattgaaatgtctacaaatgcgtaatctctacaaatgacttcaaacagagttactaccagggcgcttgctacatgcactgcattgccaaagcaagatagagcacctcaatgcagaaggtatactgctcgtttaaagttgaaagcattcacgtgcccaaatggcgttgaaacccgactaattccgcattatgtgtttttctgtgttccctcttagcgggaccttctgttaagggagaaaaccaaatttcgtctaggggtaaatcctgatccatcgttttgccatcgaagtgctgagagtggagccgatgagaggtcaaatagtgtgagatatctgggtgacggcttgcctaatcgtcaagcactgcgcgaggcctaccacacggagcgatgtaatataagattccaactcggttgccgtctttctttgcgattagcgacttccatgtgcatggcgtgaaagctctcacgggcctacggcccagtcttacatctccccgcaaccgcgggacgatattgggacgaattcggttattgtaggataaggaagctttctcccaacttggcattccttgcgcttctctgtcattgcatctatccaatcaggacaagttcttcaatgaatttagccaatcacgatcgattcgtgtgtatcccaacattttcccatttattttgggaatttacagtcttgctagaataatgtccaatacaaaagttaagtgtaaatgttgcattactcatagctgtgcctcgtctgctttctctcctctcccatttgaaaagatgcagcgggcgccgagagggcttgacatcccacaagggacagcaggacaggaggcagcggcgatgaagtgcttcagcgaattcttagctcttgctaacatgaatgaggagtcaattgctagtattgcgaattcgctgtctatacctgatgctctaccaagtcaaaacttttactctttgctaaccgccttctccattttcttgcaaactaagccaagagctcgaggaggccgtcttgctaaggctactgctgtgggctatatgtcccaagttgtaaacctgctccgagagcggtaccctctgtacttgtcagacagcaagcgaattgcgaaaatacgcgacaaaatgggttcaactattgaggagcgaaatttgctagctggcgtgcagactggtgaagctccaggctgcacgcgcatcgacttgcgtgttctggtgcaggaaactgcgattaagggggttggctcaggtgataagagtttgcatgacgctgctgtactaacgttaatgtggcacatgtttggtcgagcgatcgatacctgttttgctaggaagagccagctatctatggcggcattgggggagctctttctgcatctagctcgaatcaagacttcggtggttcaaggcatctcaatttacaaggccgcgactcactgggagcagtgtatgctgcacggcctcggaatgctgttcgtcggagcgtcggagccttccagccatgtattcccgctaatgccgcacgcggcggcatcggatttgccaggggagaagacctatagccaagacgaagctatactctactgggagaaccttgaaaagaaagctgaaccaaggaacgagccaccaacaaagcgcgtgagaggaaggcccaacgtgtccaagtatattaacgacgtcatcaccatggtctgcgaacgccaagcccaagcctatgccccgctgcccccgacgctcaccgcagggctgagcagccactccttgcgccacggctccgcagcgtatgcaaacgcctcactgcagcttgcgatccagtggatctcgacccggggagcttggctgctagactcgctcacgaaggcgttcgcgtacgtgggtaccacgacacgcgaggaccagagtgtcggcaaagtcctcgctggataccgagacccgcacctgccatgcgtcacgcccacgattgccaccttgagcgagcttcttcctgcgctcgagtacgcccagctgctaaccctgcgcggccagctcatcaagaacgtcagcggcttcacggacaccacgctcaacgtcgacgcctttgtcctggatgcggcgctcgcgtccctgctcatccatcttgacgacgtcgcgacggcagtccagcaggagcaggctgccacaggcttcacatcgcattacctgtaccgcttccacgaagctctggacgcaaccaacgtagcgctgggagctcggctctcgctggacacgtgcattggttgggatcggcagcttcgcacggcttggcaaacggagaacttcgggcagctgggtgagcgcagcaatggaaacaccaccatacttgccgcagccgtcacccagatgctatcgtccatcacagcaatgcagcgcacacttcagaagctcgtcgcggtccacgagagcaagtccgccagcgctgacggtcctgctccttgtcgctgtgctggccaggccccgcaggcgagcactgacaccgtcgttgaagcgcactctcttgctggctgcttctacaagtggtacacactggagctgtggcacacggcaacccaaaagaaacaacagtttgttcgcgctgacctcaaggcaggtgtcaacatcatgatcatagcagcagggcgagaggtagacgtaccaacggcgccactggaccgggacggcgtcgcgtatcggctgtggaagcagcgtgtctggacgctagcggaagacttggacaagaaggtcaacgctgcgcttgggagtatcgacggtaaaggccgatccaaaaccgcttgatcgctacggaagcgctggagaaagccgcgcattgaccaccgctctgcgtacgacgcgctctgctcagcatttatcacccgcaaagcgaacggtggcatcgtcgaccgctgcacacgagctagtcaccaatggaagcaaaaagacttggagtcgtaggatcacgcagcttgtattaacgcttaatacattcctattcatacaacatggataatcgaattcaaggcgcaaatgcacccgtcatcgccatcccacaacttaaacacagcgcatggattcccgtcagtcccgatacaaagtcatacaccatagaaaaacgctcacataccgtcagcgagcgcgcacgacctcgtgcttggccgacagctaccgaaaccggcagcataacgccagccctgccgggttttgtagctgctttcgacgggtccttgcgtgaggcgcgtggggcgcgcctgggggcactcgagtctgggatgaccggcgggggcggcgtgcggcacgctcggagcgcgctgttgtgttggagatgcggggcggaaagtgtgaaggcggagaaggctgcgcagcctgccaaaaataaaaccttaaggttttttcttggctttggagccgataaaccagtccatactttgttgaagtcatttggaatctcacttatgattggctctcctcattgggagcggcgtttgggacctggtcgattactgccaggacctccggcaccctggcagtgtgttagagatgcagtccgctacatttgcctttcaatttatgtatcccgcggcccgtgccacacaacatcccagcgggacaagaaggggtgtcgtccctaaagcgtcccgcttcgacccgcaattggtcatcccgcatcccccgagatacaagactgggccgtagtcgattgaggaaaccctctacattgcttagatcgatccccagcaaatcttcggctctgtcaggaatcagacaagtctcgagggggtcgacgggggcagaccagtaaaaagcttcataggggatttgttcctgagcgaagccacaggtgtttggttcaaattcgcttgaacgacgggcaacaggtactcccaactgcgtgtatcgagacgctgctccagtaacaaagcacacacgacttgtagttacgttatgccccgattgattctctccacggtaccatcggtccatggcgtgtacaccggtacaaaactctgcagtccgcgcaatcttgtcgcgagttccgccatcactgcactgcggaaatggctaccattgtcaatggcccgtttggttggaagaccgaatcgcttgtgccaatcccgaattgcgaccacagccacatcgctcgtaggtgaatcacatgcaactaactcccaataatgagtgagctcatctttcagaaccaacacaacatggaggtgccgtacccttctcccatctcccatcgtgaggtagtacaggtgaagcacttcgtttctcttcgtggcagtctcggtctccgaccacggacgccggatcagcttgccacccttgatgtgcttacacaagaggcactggttcacgaagcgagagacaactgcagccaaattcgaaacggagaaatgtttctcgagctgggtggtcgtggcatcaatgccgcggtgcgcctgcattccacaataagccaccacgagaatgcaaactagcaggtgcttcgcctgcttggggatccacaacttcgcgttctcgtaggccagtacgatcatcagcattttgtggcctcgggcgctgatagctagactgcgccgcctggacagcgtccactgagggtcattcaaacgcttcatcctgcaagggcctcagcacgctcagctctcgctgtcctcgggtcaggactgccttcgccttcaccaccgtctcgatgtcctctctgacgggccatcatgagaccatgtcagcccagtggttatcttcgccgttgacatgggcaatagtgtagcggctccctgcgagagtcatgacccagcactggagtttcgcacgcacgtgcttcttcatgtcggtacttggacagaaaatttggattaggttcgcatgatcagtgtaaatgcggaagcccagcgatcgctgcagcaagtttccagctcggacacagcatacaccaccggatacgcttccttttccaccaccgaccactgcaactgcgaggccttaaatgaaccacccttgcacaccagcaattcgtggctctgttcatgcaccgggatcccctccttccagttattgacttgagttaagatcacggcccagtcacggtccgaggcatccgtgctgtcgttgcccaggtctccacagaacaggcggaagtcattgtccggccagtcctcgagcgtggggtcctcccaaatctgtccacccgcaagacgcaggtgcctcttctgcttcttcccggctccgtcgcgtccttgaggacccgccgcgatactggccgccgtcctcttggggtcgtactcgtacacactctgctgcctgttcatcatctcctgctcctccatgggcagcacgcagcctgtctccatgtccactcgaggctgcatcggtctgtacgtcgcgcccggcctggacgcagcagtggcagctgcatgttaggcaaaccacagcttcatcatcaggggacatcagctttgaactcgccagacgcttcaagaagcattgatacgctgcagcttcatctccacccacaagatactcacacaggcagcatggcgcttgcgacggctgtggtccttcatggcttcgtcaaacttggcttgtaggggagccactgctctgccataatctaccacataatcccgacgccagttagtgctgcggctcagcagtattatccggcaaaggaagcgagaccagcgcctccactcgagctggatcatgcgtcactcctcgtccatcggtattttttccgcatcaggagactgcttcctggtagagagtgttcttcttcaagtttagcttcaggttgagctctcgcagcctcgcaaagaacactctcaaaacctccaggtactcttcatgagaagcagtatacaagacgacatcatcgacgtacacaggcaaatggtcgttgattagatccgcaaacgcagtctgcatagtcgactggaaatgcatggctgagtcgacggcaccttgagggacacaagtaggtgtgaacacaccttcgcccgtctgaaaactgaacggcttacggctgttctcgtggaccggaagctgccaaagtccttgaacatgtcaaacttgcccaagccttcgcccccttcacacactgagcgactacagccaggttcggcacacttgcagcgatcaggacaatcctgctgttgcagcgacggtaatcacaggtgatgcggaattcttctccatccgccttcgggactgggacaacagcactcgaccagcgactggcattgttctggaagacgtagccgcgctcagcaagctcgtgacgtagttgcttgtagccgcgcatttggcgcggcgaggccctcccaaggctgctcacttgcgagatatttacgcgcaatgcagaactatcgcggaccagcttcagatcacgtcctggacgcatcacctccgccacttcaataagacggctgacaaattggcgaacctcgcgatggataccaaacgcagcatccaggtacttgacacagacatcgagcaccttaccccgacctggtcgtccgtgacagcactactcacgagcgatgtatcacaatggattgaaacccatctagacccggatgaagacggtagacggtcgaactcactaggcaactctgcggaggatgcatgtgctagcaccttcaacggtagttagcaagctgacagaagatgtgtaggcttctgacagacggacattggcttagtcgttagatttcctaaatgactgtaatgtacctcaccaaaaactaactaaactaatgaaatggattgctcgattatagcagttctacctcaaatcaacagcacaattaaaacttcaattgacccaacgcattgatttttttaacaacagcaaacaggttcacctcacgccacatgaacgaaatagactgctaatatccttctagcagttggtggccttctccagcagcatgcggacgttctggtagctcaaaccaacgtccgtgaccaagctcagatccggccgtgccttgggcagccagaggaagtccgggtgatccgtcttcgactcgcccacccactcaccgccgagaacgttgtagtcgttgtcgagctcgagcaggtacgtgtactttttgcccgtcatgtacctcgaggcgcgacccgaggacaccagtccaccgtcttcgaacgtctcgatcatccacgaaaccttgctctcaacatacatgatgcgctgagccgcgctgttgaacgggtactgggagaccccaaagtactggttggcagcgtcggtaggcgtcatttccgtctgactgagaactttgtagctgtacacaggctggttccagacctcagcgccggccgacacgtccaccactaccgaagtaccgaagcgtccgataatgttggcaagcgcgacgtgcatgaagcctggacccatgtcacgacgggaagagtccgtgtatcggccgtactcgtccgtggtgtccttcgagtcgggtccgtagaacctggcgcctgtgaagaccgtggcgatgttcgctccatcgtagatctccgagatcagagccttgatgtccatgggctggaaggtcacgccgttgtgctggacagcgcagtttggttcaggctcaagcagagcagcgggcgcccaggcgtggcagataccaaaccacgtcggaatgcagtagccctcgtattgcccctcacgacgactgcagacactcccgtccttctggccggcgcagtcccagttcgtggagcacttgggtcggtcggacattgacatgacacccgtggacttggacacggccgtcatgagcgtgtccgggtcgatcccaaaggcgctggcgtacttctctgtcgcgctgggttcggtgtgagacgcccaccggtagttgataccgtccaggtagatcgcccagtagctgctgggccatggctgcgtgtggaacgccgcatttgaagccaagttgttgacgttcagctccaatcgagagccgaagtggttctcgagcttctggatgtcgctcgtggtctgctccagctttcgctcgctgctaggcgccatgacggatccattgcccacgggggtggtcaccaccgtcgtctgcttgctcgactgctgcttggtcgaggtgttggactgtgacttggtgctcgtagttgttttgccattactgtcggtcgtggtagaggtgctcgtgctctggtgcgtcgacgtgctgcggttgaacgtcatgacggtgtactcgtgcacttcgtaagtgagtttggtcaggtcagtgcccggagcaatgccaccgaaggcgggactggtgtgcgagagcgacgtcgcgctggacacgatggtcaccgggttgttggcgaacggcgttgcatcagctccatggctcgccaaagctgcggcgctagcagtgagggtgaagtaccaagtcggcctcatgattccgtgggcaactgcggtggcgtgggcgagttacaaaatgacaagcgtagagtagagtcttgtaggtcatcgtggtgctcatgttgcctcggacaggaagcgaagaaaccctcttttagtgttcgccagatgctggttagagcgggtagagctctacaccaagcggtacactcgtctagcaacagcaacagcaacagcatcaagtattgattaagtggatatttccgtgccagccagctacagtatgttgacggacaagctgcgctggagagagagctgccagacgcgcgcctttgtggaccagaacgaaaattaccgtgtggggcggggggtgtttgtcctctgcgggagccggaggtttaccatcaccagtgggcacgtcgtatgcctccaaatggccgctcgtcgtagtatccagcagcttataaagcctctcctctgccttctgacatctttatcagagatcgctcatggaccatcgaaagcacggacagcaggccgtcctaagacgaatacgcgagcggaataccgccatcttacaacgctagaagcccccgactcgaaaggctgaagagcggaggcacgacacaaagctttcggtgtacatgtatctggtattcagtgaatgccattcacagctgcgtcggataccgatgcaaaggcggactgtacggcaacttgaggcaatttttgcgctgcaacctcagcttccgcagccatcctgtctgggtgggtgcaactcgtaacaagcagataaatcccgtttgtctcgcttgggtgtgaaccaccattggccgcgctccttgaagccggtcactcgagtgagacttgcagctccgtcgtgtcgatcatttcggcgttgctgcgggacagctgtggacagccgagcctctgtcggtccaccatgacggtcatcggcatacaacccccaagtcacttgcttggacccgtttcgacagctggggggtgaccaattcgtatgcaatcgcttcaacaccacaacgctcgactcgaaagccaggaaatgcagacagaaatgcacacacacacacccgttggctggttgtttgctttcgatggagaagatgggcagagtccgcgctgtgcgcatggcgagcacgcgaaaattcggtctccgccgccgttcactctccaactctcacgcttgagaccacccgccaggcttagcagctcggatattcctcctcctcctccaccgtcaccggtccacccgttcctccatcggcatggctttcgttcgctcttctgttgctctcctcgccggtctggcgctcgccgctgcttcgacggcccaaggcgccacgattctcggcggctacgcgcagaagaacgcgaccagcgatgacaccgacctcctggtcaaggcggcaggcaacgccagcacgtacgacgagaaggtgaccgctcgcgtctgcctcatcgccgttgaaggcctccagacgcagacggtggccggcaccaactacaagttccaggtcgcgggctgccccgtgcagtccgatggcgagttgggcgcctgcaaggaccgcaactgcgactactcgagctacaacatcgtgatcttctctcagccgtggaccaacacgctcgaggtgacgtctattacgcccgcggaataaatctttcaggccacagtccgccgcacccaagaatataagccccattggcgatctgaatacaatcgattgatcgattcgcaatacattgcctggaactgttcccaatgaataaatacctcaagtaaatcaagggcttgacgcgtagttaacatcgcgattcgagccggcttctttggttgccggtcaaaacgaaagcaggccccccaatttgcctccggccagtctcacgttgtgagtttggtttacaaggtttgctttgggagtaacattcctcaacgcttttgtctaatggtgcatttcggtgttcttttgcactctattcgagtccaagcagcattatcctactacgtatgtagactcagcagcagcatttcttcttcttcttcccgctgtgcgtgtcttttgacggctcgcgtagctcgtcctcgctgtcactgctcttctttttcctcttgtgcgagctggacgacgacgacgacttccagctactgggctctttgctgtacatgacgtacttgtccttttggttgagctccgtcgccaaggctgccagttccgggttgtgagtttcgagcttcttcagccacttgaccgtcatgcgcttgcggccgctacgcgtcttgcgccacacggcggggaagttctgcgagctgcagtagttctgcgtgacagccacggtgtcgtccacgttaaacactgcgtgccaccagcctccagggatatagaccgtctccccgggatattgcataaactcgatgcactgcagagtctccggcggactggcgcgcttcaggcgaggcagtagatccatgaagtagttgacagcctcgtcgtcttcgttcccacgaacgtgtttcttgccgttgacaaggttcttgggaaggtgcggcggaaacagcacccaacgcttgcgccctacgagcagcgtgttccacgcactcgtaccaagcgggtccaaatgcagcgtagttcctgaacgcttgggtccgacgaggaaccagcggtacggcggtcgtcggtcctctccaacaagcgaaaacaggtcctcgggaaagtatttcgggactttgtagtcgtcgagcaggggcttggtgtccttgtggtcgtcaaaagtgctatcgaagatatacaggggactatcatccgtctggtggttcaagtacgtcataaagtacttgaacttcatgcggatggtcttgccattatcgtcctcaccgcatttgagcatcacgcgcttgtaattcttgcgcagcttcttgagcgaccagtgcttcacagcgccccatccttcagcctccgggatgccgtcaattaccactggcacctccggaagctcgtactcgtcaatgaaccttttcacactcagttcgctgcagtgctcgcgcttaatggggttggactcgtccagcggcaagtcgcacacattggatcccgcgaacccttcgcggttccaagcctccgggtcgatgtctagcagccgcgacaagcgtagcagcaacggttagctctgagtaaaaatgcaaacgtccatcacacagttccgtgatggtgtaccaacctgatcggtgcttcttcttggcgctgtagactgcgcgctccaccttcggagggtaaacgggggcagggacgggagggaaacgcgggcccttggaggtggtgcacacgtccgagtcctcaccgtcggaactggacgaagacgaggaagaggaggacgacgaggagtccgacgagtccgaggacgacgacgtgaccgacggagagcggcggaacttcttcttgctgtgcatggccatggctgccagtggcggttgagacagcgagacgactggaactgggacgctgggctcttagcggcaggcagaggcacagacacgcgcaggacgcttgcaattctggtctgacgtcgactcagacgcaatgcgccacaccacaaccacacaaactgaagggtcgaggtggcgcgaatgtgttcccagtaaacttcctgtacaagaactctgctccttctacaataacacatccctctaatagagcatgtcgaccacgtcacacatcctgctcccctccggcatacattcttcaagtgaacgcacaccatggcggacgcggtctactcggtggcgacgcagacgtacgtcaagctggcgctgcacgcggccaagcggccggccagcgccgcgtgcggcctgctgctggggcgcgagcagggccagggcttctccatctcggacgccgtgccgctgttccaccacgaggcgccgctcgcgccgctgctcgaggtggcgtgcgccatggtcgacgcccatgctcaatgccagaagttgaaggtcgtgggcttctacttcgccggaagcgggtactcgccgtctgattctggcaacggactcagccacttcgccgagaagctggcggacaaggtcgagctcaactactcgagggcctgcgtgctggtggtaagatatttatagatgcaccaagagctacttttagacgctgacttgaagtttgtatgccctggtattagctggacagccagcagctgagcaacccgggcaagacggggctgcagttcctgctcaaggacgtcaagcgcgggtggaccaaggtggacaaccggcttaaggtggcggacgacgcggccctagtgctgaccgcggggctcaagcagaacgtccacaaggacgtcgtggacgtggaggagcacctggaggacgtcagtaaggactggcggaacccgcacgtggtggagctgctcaagctcaacgtatagaagagagagaggggcagatacagtagcaagcagaacgattcattcacgtgagtgtggtctgtctaccttacatacctacatacaacgagtgtgtctgtttgtctatgcgttgctctgccttgtgtctagctagatgaggacgctcgcgaaccgggtggacgtctggacgaacacctcgtgcttcagaggcgccagcgccaatgcgtcgtggctcgtgtgcttctcgggtgacgaagcgagggaccgcaagtagttggcgagcaataggcgagcgttctccacgtcccaaagcagtgggtgggcgtggcgcagtgcacaggtcagacgtccagctgctgcgagctcgccctgtgtcaccagcgcgcacacgacgtagtcgccgctggacgtccagagcgcaggtcgtttggtggagttttgcagcaggaacgccaccacggaggagtgaagaccgtgctgcaagagcacggcgacgtcgaagcgcagcagcgccagctccacagcggcagaccaactgggagatccttgggggagttgacgcacaaccgacagggcgcgctcggcgtacttctctcggaggttgtcgaatggacacatgagcagcagttgaatcgccaaatcgaggttgctggcctcccaatgcaccaagatgaccgcctcagtggcttcctcctcgctactcagctccgcgtacgcgtgggtggtgtaccaactcaacaggcgagcaccccacacaccccgggcgaagagagctgaccagcatgtagcatcctcctcgttcatggatggcgcctgcctctcagccacgactccaacttgaaactgcgcttgcactcgagtctccaccgcacgcttctgctcgtcttgccatgcagaggcactccgctgcgcagcaccctcagatgctccgagtacgtcgtcatggcgcacgagcaagttgctcaacgccaccgtcgccgtctctgcgaaccgtagcgccctcgggttgtcatcgcctgcacaaacctctatgaaggcgagcagctcctcaaagacagcagcaaagtggtccgaaatgtcgctacttgggactaccaggatgcgctgcgagtctgggtgttcatcaagcttgtgtttggtgagaagcgcagaccaaacagccttcacatgaagaccaaagtgccacttgaccgcagtagcgtctctgctcttttcgccctcgcacgttgtcagcatgttactcagcaccgcagcctccgtccacttttgctgttcttcagcgaaagcgatcagttgcccccactgcaacagcacggcttcacgcaccacgccgcttacacgcttgacttcctcttcgtcggcaggagtctgcattgctccaagccggttcaatccaatctccttcagcaatgtagacggcgactgcgagagcattgttacaactcgctcatatatggcgtgcgacgccgtctttccatctcctgaattgcccaacgcgccacggaggtagcgttcaatctcggctgattgcttgctgctgggagcgcccgaacctgtgacccacgtccacgctagtcgttcgacccattggacattttgctttgctccatcttccccagcgcccatggcctgatcaatgagattagtgatggccgcctggtagctgtgtgcaatcgcactcacggcaacgtcaccactggccttgcttccgccggcgcgcagtaccaactccatgatgagagtcgccagatccaccgacatcacgcgcttacaaagctccatcagcacggtattgtgaagaacctcctcgttggcagcttgctggagagaatccatcgcaaaccacgccttcaagctcgaagccaaggtctccaacgactgtgtgtcgaatgtcaaggcactccgttcaatctccttcagcagcagatagcacacgttctcggccaactcgcgttccagatagtgcagctcctgctccttccgcttgaattgggcggggtcccatgatgaagaggacgaggatgaagtagacgacgtggacgaaacgtttgagcgcgggcccgagttttgccacgagttgtacttcgtctggaagagtgtcagcgtgtctgccacgagctcgacgcgcttctgaggggtcagcagtgctccgaagtgctccaagacgctcaacgactgtccgtagaactcctcctcgatattcaggtgcgctaccaactcgggggttggctttccacttgagccatccaggaacaagtaatggaacaacatcaagtgctcgttcgagagaactgaaagacacggcacgcatgactcgtacgcgtagactgccagatcagcagatagcactcccgtggtgctgccggttgctccgtgctctctccagattccagtcagcaagtcatttatatagatcatgaccatagagcttggcgtcacacgatgcagcttgcgtaagatcttggtaacaaacttgatagtcttgccagtaagaagaggccgcactgcttcaacagccatctcacgattcgcaatcatagcttgagggtccgtctgtgacaaagctaaagatttcaacagttcggcggttgtcgaggctgcgccgatgagcttgaggtcaactggctctacatcgtcgagcgcgtctccaatttccttcaattttttcaggcacatgaacagcaaggtgatacggtctgtcgacggtttggacaaaggaaacagagatcgcccgtggggggactccgacacagcagattcttggtggattcgctttgagcattccaggaccatgcgcaaaacaagtaaaatgccaacgtgatccgttccatcgatcatctcgtacacgctgggttctcctgcagcccctcttcccaacaaaaagtctccaaaagtaaccggcttctgtaaagcctcctccaggatatcagtctgctcaatgtggaaggcttgatctagctgctctcgacgacccagtcgactgctatccggcggaaatagcagcacgttcttgatgtacgctagcacacagtcatactcgtcgattccgtacttgctggcaaactgccttgagagctggaagtgctccttcttcgtggccagcagcataatcttctcgtttcggtagctttcatcttgcgagaaccgctccagatccagctccgtgttgaagaacgtgttcatttgctccatttcctgcgacttcttttgcgaaaccagtcgctcttggcactgctgcgccaacttcacgtagatctggcttcgacgctcagacataatcgatcgagattgcagtacgcttgccatgtcgtctaaggcgccattctgagactcactaagagaaccagcggatttccgtacagcttcataggatgatgacaacgtttcaagacgctttctgcgagtcagtagcgcctcagtatcactttcagcagggttctccttggcctgggccacctggaacaagaagaagtgatgcaagcaccgaactacaacttcacttgcttgcacagaagcgttcgttggctgcaagtccgatactggctgatcaacggaaatcaacggcaggatatcatcggtgcagaatgcttcaaaactttcgtcatccacgcagagatcactccacagcatcaaataactgaaaccaagctccaggtattgctgccagtctccagagtcactcgtcgtgggaacaaaagtcaactccaacgcctccttcacgcacagctgcaccatctgctgtaagaatgttgatacaacctctgtgtcgtctttgttgtcgctcccggagtcgttgttggacatcacttgggcgagctggaaaccgtgctgcagcagtcgtagcaggaactggcggtcattcttctcttcgtgcagcaactcaacgactacatgcagctcattcagaagcacagcttcagcgctgctagaagttttgctgccagcaagtcgtcgttgctccaggtcggcgtcggacaagccaagctctaccattaagccctggatagcttctattctttcctgccacgacagtaccaagtctgtcacttgatgcccgaagagatccgaagacgcaacgtttgctgcgctgaacagcgcgcaacacagtttgcgcttcttaccccatgacccgaaggacgaagcagacacgaggtccaaaatcaacgagaccaagtgcagaagggtcaacttgtcatcgccattgttctggctagctgcgagtgcttctgtctcggtcggaatcccggcgataacttgcatggtcaagtcgtacgcaacatcgtaatccatgcaatagagtgctgcgtaagcgcccttcatccagatttccagcctctgcgagtcaacgcggagtaacttggccaagtacattactgcagcgagaggctcgttccacagctctggagctgactctccgttcgtgagatcgacctcgccagcatgatgccgttccagccactctcgagcacgcacggacggcttgtagttgctcgggttacttacaaatacttgacagacagcatccagtcgggcgctgctctcctcctgctcctctgtcgagctgcgaagcttggacggtgacagtttaactgctccgtatgtgagcaagtctagcagttcgcaagcgtgcgcggtgtctgtctcgagcgccaaagcctcttcatagtgctgttttgccccagactcggcacggtctccttcatcccacactgggagcgatagcagttgtcttgcgataccgatgcagcccaacgcagcatcatgcgtagtatttgatttggcgtcctccgaatacccagtcaccgagtcgagcttcgttcgaatcgccacaatcagtccatccagcacgtgctcgatagcctccacatcggaggcgatccagtggttcactaaattctgggcagcatcgacgtaggcgcgttcaggcgcaagtagatgcttcaaaataacatccagaatcatctcttggcttaatcgttcgccaaacgcgtgttctttcagcttgactgcgtcctgtagcacttccatccactggcttccatccccgttttcctcgtcgtcggaaaaatcgcctggtaacgcaaactcgcacatttgctctagcaaaccttgtggcccaacactggtgccaccacccgcaccaacaccactactagccagcatgcggtacttgaggctactgggtgacgaaaccacgccgtatttgctaagcacgtccattgtcaccatcagatcttccatctcatccacagccacctgcaactgggcaatctccggcgggtcattttccttccggacgggcagcgactggaaaattgtccacaactgctctactagtgcgaaatggcgctgcatgtacacatcctcgtccacagtaggcgatttgtcgccaatgatgtcagaggagttgaccgaataaaccacatctaaggcggtctcgatcagctgagtgtcactctgaatccaccggttggctcgattaatcgatgggttgctccgatgaatgagttgtgctgcaaacgtcagacttcccaaggaggacttcgatgagatagtctgagctaaccacgaaaaaaggtcgtccaaagcgtacagctctctgcgctgggacacgaacaccatgtccaaacgatccaggataggagacacgtccccagcaaaagtcttctcgtcagcagtacccaccacaagcatcgcttgatcttgaatcgacagagcggaccactcactcagcgggagcaagcagcaggccgatagctgaagcgggtacacgcacttgtacaagagctctgtttgcatgaagaactcctccagcgaccttttggcttgtgaagaccacccgctcaagcatttggtggccaagcagctaagctcgtaagcaaaagcaagctgaccgtaacgagtatccagctccagaatcctcttcgtgaaccatttgccgtacactgagctgcgctcgtcgcggtccatctgtgcgtactcgtcaaactctgctcgttcttcatccgtaaggtcctgaagctgattatcggagagaagcaccaccggagtcgccaactcgttatcgtcaccagcttccgcggttaggccatctatcttgctcaacctgcatatctgcccgtcgtcgtctatctgtgtggcaatggctggtaggagagattcataagtggatggcgacacgaaaggtgggagcagctcgagaacgtcaaaccagtgggggagcaaattccacgcatgtcgaccgaatagaacagtgagcgcgcccacacgaccttcccgagcaaactgcttcgctgtcgccaaaacagacgcggatctaaattgcgcatacgcttctccatcaaagagctggtctcctgcaaccgacgtggtagaaacgccttcttcttcacacagaactaagcgcaatgtttcgaggcggtaaatgtaccgctgtaaatccaccttttcttgcgagagctccgttgcaacttcgttgccatcgtttaagcccacccaggcatcccacgccacctcaagaatcttcttcatgttgccgctggaatcgtccgagatgagatgcaaacattcgccaaccacccactgcttgttggaaatcgctcgcaaatgctccaatgcaactgcaaattcatctcgctccccgcgttgtagaagcccccgcggccgcgttgacaaaaagacgagatcttggagttccgagcttgttgaagcggcttcgtcgttaatatcttgcttgatacaacccgcttgatttcggtactgcatccatacacgctggtgaatgctatcagcattaacagtactctcactcgtaccataaagcgcaactgtcgcgagagcgtcttcaaaccgctgtgcatccatcaacaaatcgacaaaagtttcgacaggtaagctctgcaccagactagcaaaccaaatatcgccgctcacaacgacttcgcatgcggagaacgacgcgctgtgctttccgcccgagatctgactgcttggagtgagagcaaggctttcagttacgccactcgctgtactcatagagggtctgaagtgccttgtgggggtcagcacgagacggccagtaggccctgaaggtgagatgtcgtcgtcttcgctgtcgctgctggtagctccagatgcagctccttcttcggagtgagcaacgaactttgagtagatgacgctgttgttcgtgagtacgagcgcaaccaagtcggaagtcagccacacagccgacttcatagtgacgccatgaaaatcggcactccatacgtcctccacagcttgccacgccaagacatcggcacacgcatcaatttgacgcatagcaacccttcctagttcatccaccatactcacgaaatttccgcaaggtgacagtgccaagtaacgaattgagccttcgatcgcttccgactctgtcgcttctccccctaccatcatccggaacggagccattagagcactcgtgacgcccgtcaataggccaccaccttcctcagtgtccgattcctcctcttcatcctcttccccttcttgtccttcactcgcctcctcgtctacgtactccaccttccccttctccaccatcgtaaagtccagcagctccgcgacttccgtgctgtccttgtcactggccactctccagacactcaaagacgacgcctggttctcgaccaagtccgcgctggggtctcttacccctcccgtcaccacaagcgtggcgctctgcagctcataactcgcggccgtgacgcccgcatgccactccgtcagcctcttgaccactttcatcgtgaaaagccccgccgtgtcttccgacgctgtctgttccatcgccaccagcgccaacttggccagttgcacgcccacactgagccaaacgccgtctgcagacagcacgaacactctgctcccgctctgcgtggggaagaacacggtcacgatgctcgtggacgggtcccagtgcttgacagccaggtacttggctgggtctacacgtagtagcagtggagggccctgtgaggcctcagacgccgcggtagaagccaaccactcggggcgggcgaatagccacaggacgccctcggattcgccctctgcgcgcgggattcggccgctcacgaccagaaacttgaggtccggactccatgcaagcgtccacgcgcagtcaccgaccgtagaagcctcggagtcgccggcttccggcagtaaatcgaccagttcgggctcctcggcgtccgcctggtcgtccgtcttgaacacgcccaaacgcacgcagttccgctccgttcgcgaccggaatagcaccgccaggtgagcagaagacgcggcagtagcggcgacctcgaagttgtcaggcagcgacgccgtggggccgcgcgcgagctcgcgagccgccagcagcagcggctgcgtcgccatcttcgtcaacgtgtcgatctgcggatcagtggtaccgtgtacccaagagtgattgtcgtgtggaatcagatctgagtcaatattgtgtcgtgcacacgagatacgcgccgccgacttacccagtaaagcgacgtcagtgagcgaataggcacacagacagacagccatggcgaccaaggcagcggtgcgcaagcctctgatgagcttcctgcggctgcgcgcgcccatccaggagcagctcctcatcgaggaggcgctgttccgcgccgagtcgcagcgcaactggttcatctacaacgacgcgcacccgtcgcccaccatcgtcatgggcatctcgggcaagccggagcagctgctgcaccaggatgcggtcaagcgcgacggcatccccgtgctcaagcgcttcagcggcggcggcaccgtcatcgtggaccacaacacggtcttcaccaccttcatctgcaggcaggaggacttcccgcacgtgcggccgtacccgcgcgagatcatggcctggtccgaaggcttcttctcgcccttcttctcgcgcgtctgccacgagcacctggtgcgtacgggcgtattgctgctctgctctgtggttgcaaggcgctgtacttactcgttgttgctggtgccatttgcagaagttctcgctgcgggaggacgactacgtgttcgacgaccgcaagttcggcggcaacgcgcagagtctgtccaagggccgctggctgcaccacacgtcgttcctctgggacttcgacccgaagaacatggagtacctgaccaacccggcgcgccagcccaagtaccgccagcagcgtagccatctggagttcctgtgcccgctgaaggacgtgctgaggcaggagtgttccaaccgcgagaggttcgagagcgagctgcacgcggagctggcgcacaacttcgagatcgaggacgtggacctggaagacgtcaagccgatcctggagacggagcaccgcaagtctacgcggttcctggagctatagaacaccttatcaatgagcagtccgccagttagagctagcactagacacgaacgaatcatgcatcggcatcaagagatgtagtcgtatcaatccaaaagggggagcactacgttgtggggtggcaactaaaccgtcaagtacgccgcgtcgagtctgctcgcagtctagttatcggacgagatgaggcctaaataatcatccttgatggttccgatagcattctacagcgacagcaatacacaactgttagccaaccagccagtcaaccatttccaaccacggacagccttacgatctcggtgacgtcgacgctgacgcccatgatcttgagccgcacgccgcagcccttgcggatctcgacctcccggtcgtccgagatccaggcgttgctctcgtggtcgtagccgttgttgaggtccgtgggcatggcgtgcctcgacacgaagacctgcagcgggcccacgtccgcgaagaagccgagctggttcacgaccgtcacgacggcgtccagcacctggttcttgaaggggcggaagaggatggcgcggtagcggatgttgaagcacacgaagcccgagttgtcctggatcacgcccttgccgatgtcctcgtcgcgcacctccgtgaccgtgatgacgtagccgtacttgcccatggacgtgccctccacctcctcgatcaggcgcagccggatgatatcgtgcagcttgggcccgaagtgcatcgggtgcagcagcaggtcgcgcgagagctgcttgaggaagaacatggcgggcgacgtacgcgcgaagcagtaattgagctcttttggagctgctggcggctaagcccgaaatgttgcgcgaaggttgatagtagaacatgtattttaaggtgacgcgaaggtaacttcaagattcggtcgcattggaacttattgtgcttttcagttgttttggcgtatcagacgtgtaaaacagctacagtgcctactaagatggggctaggttatcggagcagattagcaggtccctcgtagggaattaggaccaagaattgctagtccgatggaagcacttgcgcaggtcctacaaacagccgaaagcccgaatgtcgcccattttcacggcattcggggtttgaggtcttacgaaggactcctgccaagtcttgtggcagcacttttatacgaactgactctaatgcggcgtatgtcaaacgcagaataaacttagggaaacacgatgcagtcgatacgttaaacactccagtcttcgcccttcgccttcgcgggttccggcattgcttgcttccctaaacaaagcttgcttggcttggactccaaccggagtccattgaacgaagagactccgggagaccgctcatcggactcgtccgagatttgcatctcagatttagagaccgccaacctcagattaactgacctccaaagtcctacgtaggactcggcaaaatgaccgaaaggcacaatacatgttacttatgtgaaacgaaaaggctggatgtttcggttttcaggacgggtgccatggctctcaaacctattgcaaactctatgggagcagggtagccgagctgctaaatgtagctctaccggtccttaaaacccttagaaagctgacccagcgctagtcaggggactatagacctaagggttgctttggggctacgtttgcgggttgttcatgcttctcaaagccactgatgtcgatttgggatgtgcattgtgatagatttgcgggtcatttcacccccctccaatccgaaaacatggactgtacattttccggaacaaaaagatggaactaccgtacctcacagaaagaatggttaacagatatcatgcaaaacaagattttcgagcatttactttcgtttcattgctttttcttaacacaaagaaagcatttccaaatcgttgattaacataaagtttaaagcgtttgaacttcgcctaccgaatattagagcaacaggcctcggacaggcccacaacctaaataacgagcttttccaagagcacatggatcaaccgcacttgggcatagaatggaacagataagactgctgtcattcggtagcccggagacttcgtcttggccgtcctaacgtacgcatcttgcatgatctatccgtgggctcgacgacactgcgtctctacatccaactaaaccgttcttctgtatgaaatgcacgctagtgaagcggcaccactcacccttctattcgaatagagtagtttcccgataaatatcattccctggctagcctgacggatagacctgaacaacctgcgatcgagacagatcagcatgtccacacggaactgattgaatattgtacctgcaacgacatcactcacaactaaacatcctctaccacctttgggaagcgcttgacagaaagcagaaacattactcgtttcggacagagacgttatctgaacctccaccgctcctgctcctaagcgatcccgtggcacgaccgatgtcgcggacgttacactcaattctgaggaagatatacaggagcaagagtagcgaagaaaacggctctctacacattgctagctattcggtgtgaaaccgagcccaccacatattgagcggacaggcacgcgctcacgctaatcagtggcgtaaaccagctgaagcggaatataactcccccgtggacaatcgaacttgggttctggtaccccctccgagaggaaggaatctttacctgccggtgagatttgaagtgaaatataccggggcaggcaaaattgacctcttcaaagcgcacctagtgatcaaaggattccttcaggaacatgacattgattacaacgatatttccccacctgttatcaggatggaaatacttagcctccttctcaccgttacagcgttggtcgatcttggggtacaccaaatgaacgtaaaacaaccattcaaaacgattggctagaggagacctacatcgctcagcgggaaactttcaaagtcccccgtaaggagcaccttgtgtgcaagctcctaaagaccctgtacgtgttgaaacaagctccccatgtatggtacaaaacattatctgccttccttgaacccttaggatgtcacagacgcattaaggacaggtgtgtatttaaatgcgcggttgaacattatcgtgtaagttgacgacctcctgatcattgtgcctaaacctcatcgtaaacgagatgaaatccgccctgaaaaagcggttctccatgacaggtttaagggaggcgaaatacttactcggttggtcaattcaacgtggcccccaagaaccgaacgatatttacccaccagctcaagtacgctacgaaggtcttttaccgcttcagcgactctattgcaatcccagtagagcagaatgctaagcccttcgtaagcaactcgcctagtagagaggcagagaaagagacgacgaaagatatcccgtatgccgttggtagtatcatgtatctcatcgtaggcactagaccagacacagcattatatatgcgtgagttcagccaattcctagctcatccgggaatggagcactagaatgcaatagctagaggtttgaagtatctattagcgacgaaaaattacggtctacattttggtggatctctcgatgtcacaccctaaaaccttgtcgacaagctaacagcttacagtggctctgactatggcacctgccccaacacgagtcgggtggtcggtggatatgttagtatgcttgtgggcagtccaatctcgtggtttttacgcaaacaccacactgtggtcctcgcaacaacagaggcacggtatatcgcactgtgccactgcacgcaagagacgattttccttaaactcctccttaaagcattccgttttgccacagcgcaagccaatgttattcacgagggcagccaaagctgcattatgatatgctataacctcgaactacacgggaggtcgaagcatatacctgttcggtactgttttgagcaggaaaaagtcgagcgacacgagatctccgtcgcttactgcaataccaaacgtatggtactgatatctttacgaaagctttagacaagcatcacttcagagagctcacgatgaaatcccttgacacttaacgagagctatgcgtcggctggaatagctaaatgctttatgtgaggtaagtaacccatcgccaccgtagctgtgccgcaaagcaataattcatcactataattacgagaaaaaaattcgcgttgtacgaagaagctgtgaaattgagggtagggcactaaccatagttcccgtacagattccattttttcttaaagaaaataaagagtctagaagtgaccacgaggataatctagcccatcgccgacgacaccggcttagtctctttcaagtcgctgatgtgccgaaccttgtccctcttcccttagatgctcagcacgagcgccagcccaactacactgtgatgtacgaaacaactaagtaaagtccgtagtagagcggcacttcttccagtacatgtgctcgacaccgtccagcaatgttaaagtagtctttgccgacggtccttaaaaataaaataaaagtagataaaatcctaagcccatgaatgaagcgcagcaccaccttccatgatgtacctcgtgtgagaccaactccatgctctcggagttcatcagcaacaaaagtgtgtcattatcatcttgcgtgacgatgtccgcgcgtccagcaagctaggttgcgcccttcaatgcatagaaaaagcacaggcctcgaggatcagtaccaatgggccgcttgccaaactcatcctttgggcagaagtctttgaatgtctccttgtcgggtgccttcaagtgacccacgagatcctactcgttagcgaacccatcatccagtagttgctgatgaggctcctgagtgtgctgataacattgtcggttaacgagcagactgctgagccagagaacacggtactctggaccacgaggagaattacggcggtcgttgacccgaacctagtcgtggttgcatagtcagttgtaacagtcacttgcttggtgctgtagtacttgccgtacatcgggtaatagatgtcatcatctggcgactgttcgatggcgcgagtggtagtagccaagtcttcggtaaccgtggccagttcgatggcagaacgtacttgtgctccgcacgtggccctgcagtagtctggtctttcgtacagtatatgcctggtctatcctactagctgacagctccgcttctacgtgatactcggctccattgtgcacacagccggcaagctctgtcaggatctgtgctacagtctgcgtgtctgcggctgaaccgatgtcactatggggcctcgctacaatgccatgaaaacggtctgccgtagcgttgcaagatgctcccttggcgcactcgccgacggtccactggtactgcgcgagctgcacgatgcatcactactcgcggcggccactgatttcgaccatggccgcccgaagcatctctgagaactgcttccgacgccttgttcccaggggcttcttccttatcttcagcttggccctcgcggccttcttcaacccggcatccgcggcctcgcaccctctgctcaccggcttcacgccgaactcgacaacagaaccttgactctcattgcgagctgccgctgtatttgctctaagatcttggctgcagtgccgagcttactcttctcctggccttttagcgctgacccagcgccagcgctgctgagctcactgtcgttgagagcgttaccatggcgtgcccgcaaagcccttcccagacagcaagactgaatggattaagttgaaacagctaacgcaaggcttgcagacggctctttgaagactagggcgtttgccatgagaaccttctgatacatgcaatatcgtatacacttgtggaatgttccatatatatacacagatgtagggaggctgtccatatttccaccttcacccagtggcaccttataccagctacatctggaagctgatgatccgatacaaaaataccctcaaagccgttcgtcgagaagtaactatgctgtatagtatgtagcagtactccacgtctcccttctttccgcttatcttaggccggcacctggattgctggttgtaaagccgttagaagcagcaagaagtagaatttcgagaacgcgcaactaaacaccgtcgacataacaagttagacattgggacgttttcgaggtctaatcacttacgaagaaactcgagtgcgggcgtctctaacccagtggaccatggagcgacaagaaagtggcattcgccgtgcatttgtaacgaatgtgcaagtgtatacacaagttcttcgcagctgtgttcttcgatctttgcggtaattaaccatttcacagatatagggggcatattgcacccttggagacggtttctaaaagcggttaccagtagatttcgatcccgtggaaggaggctatatgcttacttctgctacaacggtcacctgaacttacctcgtcttgtttggtcggtcatagcttggagcgggtgctaaatccttttgactcgtcccctctaaaagcagattaactcaagtgactagtaaaactatgaccgtggtgcttacagacatctgcgcgaaaccctccatccccagagattgataccagctatgatctgattgatggctcggtatgttaacatttatcccgttctgatttttcgtatggactatcttctattactcggttcgattagctgccgtggtaaaaaacaactagcacatcgaacgatatacgtactattgtaaagatgcattgatttggaatgggtaattaccttctgaaacccacttaatttccagcactataaccctaatcggtgcgcgcgtctgtaatgtgcaatactgcagctacaaacgattcatctgagagccatttgggtcacgcgaaatcggccagtgctccaatctgaacaaccgcatcactcaatacgcaaaggcattcactttcatgggtcgctaatttcgttgggcgaaaaaagctctggtgtctccaccggttttgtgaccattgcgacagtgaggggcatgctgtacgcaaaggaaaaaagtactgcttaagcctgttgcttcgctaacgtttttcgcgtcagttcaggtaaaacaacagtccaatgaaagatatttcgataaatttcgttgtgccagtacaggtgatgtttgataaatacgccactgagaaaatggccgtgaacaatcacctgataaccgcttctgtttatggtgttgatgagcaagttttcggactccctaccgacggtccaggtgtgattgttatgcggtcgcccacgttcaacttgttcacggatactgtttgctatatgaaatcgaagctgcacgacaccagcatatccgacgactaatcagtagtctctagtacagccatgaaaatatgcacttcgaacgatttcaccaccaaaatacaacaccttcccgatcacactgtttgatagggtgaaacaaagatttaagcagacatgattttggagtcaagtttcatatggacaaactgcaatcgtgaaggccataaaaatatttgtacagctggggttcactcgtcgaagctagtcacgccaactatatttattcatcaaagctaaactgctatagtactaggagcaattggggctttcgagcgcatatctccggttgtagagtaacgttctggtgcacgtggagatcatctacacggagtatttgtttaggacgagcagactcgcagctctttgagaggctgttcttactgcgtaaggatggcggagatcattaccgtgaacgcagcgcacaatggtgaacagatttctgtcaatggaggtccgtcgatactaaattaacataaaccggtcatagtacgtacaattcaaagttgatgaatctgacgaagttggtaatcgaataagcgattaaggtgattagatcaaaaccgggaattagcattaaaagagttgggggagtcgactcgcactggcacaaatggctgcatttgataaacagaccaaatactttgaatgacacatcggttggtaccgtcatcaaaactagcatcattacaatgatagcaaggttatacggttggctttggttaaatcccatagagtggtggctatgactgtatgcaatgcgaaaggcgccaattaaagggttattaactaaggtcaacagtggcccatcagctagagctttgatggactgcctgtggtgacattttgatgatcgaggtggtaaagagatggaatgatgaagattcaccagtaatgccattaccctactgtccatggaggagctcagtccggtaaatcatggggtaatgtagtgaatctgagtagcgtagtgcattcatccgtcgagaaagtactaggtgtttgtcattttatgtaccttgaccatgtcgagtgccatcgacatagggacgtcatatcaataaaaatccgttgccaatagtatatatctaaatcagaacgcaaaaaaacatagcatatctatgcgaccctttttgggcagccgggtacctcagtgagcacaaaaagcgctgtcgagcttgatcgggtcatgatgcgactcaatggtgcgtgccggcaacaattgaagaacttcaatttgtagaagtcacacacgatgtcgtagatatgagtaacaaccgccttgcactctacgtacccctaccccgcgtcctccatgacaagacgccgtggtatactctgttcaaagggattcttcttgaaacccacgatgcagatgtactcttactcggcatgaagcgagcacttggtcatcatagcacctttcttttataaatgggaaatggattgcattcgccacaaaggatccgtcgtcctccagggccatttcaccgaagagagtagcttccgccgccgtcacgatttcgctgatgaagaagtttttttttgcttatcgccagcgtccccccgttaggtttctctatgctttatgtaaaagcatgctgtgtggaaccaacacggttatcgtacaagacaaaccccctccaatctaattcgttggactggggtgtgtatatgttacactacatgcacatgccctattcatctctgagaaaagcctgagtcaatagcggagaagatgaagtcacgacaagcggcagcttcaatgtgactaaggcatgacgctcgcgctgcgcgctactacagcaggataagctcgaagtaattgtgattgggtaatctgtgctagatgacctgcatttagattcacctgcgtgctgtcctacgatagtaatctgatggtcaagttatatcgcaatcaggggtagatttaatctataatagaggatggccgagttactatgtaagtcgacattttctcatattttgaatatgtcgcaggggtccgaggttatagaaatattagtttatgatcgggtccggatgacaacgcggatacagccacagtatgcgaggcgagactggctcaacttgcttggttgctattgctctactacactcatctatgcaatgcagctgttgctagctcgaaccttgttgcgattgtattttgtactccaggttaaactttactaaccttatgtaacccttgttacagtgtatgctcttgtcaacgcgacgcagaacggagctgtggttaccacaaacaaaattggagtcgaacacttctaatggattagaaatcgtccgggcattgcagcctagttcagcacactctggcatttatggtataatcctggtcttaaatttggattagtgtactcctgaacaaactaattcatccatttgatataaccatccacttgggagaacgtatcatgataccagtgtaacgaggtaataattgttcaacctcaaatctcaaatcatgttaggtcagaagagcacagtaaacattgtcacagcttcgcacaaattgtttattggtaagcttgaagaaaattccatttttatacgaaggtgcttcgttgctgatcctctccacctgtggtttctattttgtcactatttctatacttctctgtcccacgaaagtataccacacaacgaatcccattggtcatttgacgttggttagggcaaaattcgatttttgtccactgatagcacacttgattagaaaacctcgtagactttgaagcgagatatctcgcttatcaggcctttccacaggctgtaattggtccaccaagctaacattggcaatagcaacccatcctaaaatttcgatgggtttttttatagaattacgaaaacaaaactacggaggactaaaattactaagcgttgtgtctccttcagttctcacagataataagcagaaaaaatcaggcgttagcgcctgcctctaagctctatgatcaggtctcttatggtcaaaacgctgaggtagaaccaaggataaagcgcaatttcgactttcgtgggacagagaaatagtggtttcgctcttcttcttcgatctagaccactgattagagatcatctgcgactcaattagtcatcaatcaaccaacatcttcttcttctacttgataatcatcgcttttcgcatcaatcgttgaggaatataactgtgccgacagcacttagctctacaggtaaccacacgcttaggtatggacgggtgggttacacggggcggcactctgcagccgccgctgccattttgagtaggagaataaattgacgttaatcgtgccgcttgtaagagtaaaaccatgtcctatcaggtactttggctggtgattgaagcgatacacaacgctacccctttataatgttccggcattcatcggtggagagcgaagcgtccactgtgactcccaaaaacctaagtacagaagaatttttttttattttatgagttgtacggatgacaatgatccgtgatgtctgcgcgccaacatatcccgacagttggagcctgcagggagcttggtgcttgaggtaagtgccgcgtgcaaggccttcgtcagttccgagacatcgttgagtatgtgggtcggcgcgaaccatctccctcatagggaagatgcatgtgaaccagtcagaccagaacttggccgggttaataacccacccggaagttggggaccgatggcgttaggcggaaggcaaatgggattattgcctgggcacaaacgttctcggtttgctaggtcccccaccttattctaaaatggtgtatcatgaatttagtacaaaaatcaagatacttttgcacaagcctgggtaaatccaatcttttttaccagttgtagcgacatatttaaatatttggtgattttctcttccataacctcatcttattctaaaatttcgcgcggttcttacttaccgactaatagtctcgaaaggcgagcccctcacctcttgccgcaacaagacaaactcaatcgactttccgtttgaggttgagcgtggcttttgactcctcaaggctcaagctgcgatcaaatttattcggaagccccacagcgacggccaatccaacttcagcttcagagtttcctgaagttttgcaagcatgcgtctcgtgaatttctcgagctggacgaagaaaattcgaaagtcggatctccagaacttggaacttggctcgtctccacctaaagggccctctgtatttgttttgttgctagttgtgtatgtcccaagaacagaaaaccacggtagctacgatgcgaagggcaacggagagcagaatccaagtgccagctcctcgtgtagctgcatttctggccgagcacaattttcagagtgagccaacctcgcagttgcacgtggcgacaatccaagctcggttgcctgctgacgcgtcctggcgaatccctgacaacgcatgtttcagtagggtcaaaccgtcgatcagcttttgcaggatataaaagcaaacccagggactgaccaagcaatcgctaactcaagtttccggttagtctgcatcactctcctaggcaccgtgcttcaagtacatgttcgggatcggcacgaaccggatccgtattcatacgttttcattttaccgtaacatgttgtttcatgttcgtgaaacggggtcagaatgtccacacattatccactagcatatgtaacttaattggattccaaaatctgtatataagggtactcactcaggtacagttgtgacgctaacgaggtcgctaggacacgatgagggatagcgcactgccaacaacaacgttagacaagcaaaacgaagcaaagacggcgtgacgcacgcctcgctcacgaacggcaccagcacgcgccatcgtgaagcgattgcaaggaatttgcccccaggcaggattgaactacagaccttccgcttactaagcgggtgctctaccactgagctataggggctcttacaaccgaacgcagcgaccactttttcaccaccttccaaatcaacaaccaaacaccacaccaccagaaacgcatcacacacacctcccacgcaccacaacacaccctctcacgcactaccagtcgccgccgaccacgcaccgccgagatacaccacctctcgctgatcgacccagctcaggacaccctctcgctgcggtcgcagacgcagcccacgaagcggtcttttcgcacaacgaaccgcctcacacgcccaccgcacacgtgtactccgcgatgcaaccgacgaaccaaaccgcaaacggatcatacggctttggacagtcagagcaaaccccaaggagactgggcatttcggtcatcagccaaacaagcgaacgtgagctgcgggccaatcgggaatcggacgacccggaagacccagcggctcggtgccggaacggagcggctttcaaggatcaccgagaacaaagcgacaaagcaagaagcgcggtcgtccacacagacggttatttggacgctgaggcgggtatgctgtagccagtgctatgaggaggcagtggtggctgcggcaatccaggtgccggcccaaaataagcggagagaagggagacgtggaggcgagcaaaacgaagcaaagacggcgtgacgcacgcctcgctcacgaacggcaccagcacgcgccatcgtgaagcgattgcaaggaatttgcccccaggcaggattgaactaccgaccttccgcttactaagagcctgttcgctacgtagctggagatggagacgaaaaccaaaagtgtgaccggattggtcaaaagtaggtagcacacaacaagacaactagagatggcactgtgaattcgtctccagctctttgaggtggagaggggcggatctacctagagatttgcagggccaggcacaacatgggagacgaagatgcaattgtcctcgctgcgtgctccgccgtggcacaggctgtggctttgtatgcagaaagttgcgaaccaggacctcctgctggcaagaagaaccgttttaccgtcaccactctgcgcttcgagtcgatgcttcaatcatcagcctattcaagctggttcgagaccaatctgcgctgtacgagatccaccttcttccgtacagctagctttctacaagagcatggggtcgcttttgcacaagctaaggccaagaagcattcctacgaaaagaaggtggcagtggcgctgtatttcctgggctcagcgggtggatatcgcgaggtgggagctgcaatgggcatggctagaagctacgtcatggagatcactacggaggtagacgttagaagctcctttcagacgagacttgcctcggccctgtgctgcttgcggtgcggccgaggcttgcagacgctcgagcatgcgagatggagtaggctctggcgtagcagacatcgccactgatacttgagctagcggaacaaatgtggacgcagtctcggcgccttctagcagcagaccttcatcaccggcagatggtgtcagcgagacgaggggctcggacgctggcgtttcgtcatgacggtcggggggcgcaggaaccgaagagccttgagcagcggcatgtgccgcacgcgtggccgcactggtgaggcgagtcggcattttctcaagtggggaggagagccatcccatatttgtcctgtgattggcttaaaatttgtctggagatggatacatagggaacgagctgtaggtggagatcaagcaccatctccatctctagtacaacgcgaacaggctctaagcgggtgctctaccactgagctataggggctcttacaaccgaacgcagcgaccactttttcaccaccttccaaatcaacaaccaaacaccacaccaccagaaacgcatcacacacacctcccacgcaccacaacacaccctctcacgcactaccagtcgccgccgaccacgcaccgccgagatacaccacctctcgctgatcgacccagctcaggacaccctctcgctgcggtcgcagacgcagcccacgaagcggtcttttcgcacaacgaaccgcctcacacgcccaccgcacacgtgtactccgcgatgcaaccgacgaaccaaaccgcaaacggatcatacagctttggacagtcagagcaaaccccaaggagactgggcatttcggtcatccagccaaacaagcgaacgtgagctgcgggccaatcgggaatcggacggcccggaagacccagcggctcggtgccggaacggagcggctttcaaggatcaccgagaacaaagcgacaaagcaagaagcgcggtcgtccacacagacggttatttggacgctgaggcgggtatgctgtagccagtgctatgaggaggcagtggtggctgcggcaatccaggtgccggcctaagataagcggagagaagggagacgtggaggcgagcaaaacgaagcaaagacggcgtgacgcacgcctcgctcacgaacggcaccagcacgcgccatcgtgaagcgattgcaaggaatttgcccccaggcaggattgaactaccgaccttccgcttactaagcgggtgctctaccactgagctataggggctcttacaaccgaacgcagcgaccactttttcaccaccttccaaatcaacaaccaaacaccacaccaccagaaacgcatcacacacacctcccacgcaccacaacacaccctctcacgcactaccagtcgccgccgaccacgcaccgccgagatacaccacctctcgctgatcgacccagctcaggacaccctctcgctgcggtcgcagacgcagcccacgaagcggtcttttcgcacaacgaaccgcctcacacgcccaccgcacacgtgtactccgcgatgcaaccgacgaaccaaaccgcaaacggatcatacagctttggacagtcacagcaaaccccaaggagactgggcatttcggtcatcagccaaacaagcgaacgtgagctgcgggccaatcgggaatcggacggcccggaagacccagcggctcggtgccggaacggagcggctttcaaggatcaccgagaacaaagcgacaaagcaagaagcgcggtcgtccacacagacggttatttggacgctgaggcgggtatgctgtagccagtgctatgaggaggcagtggtggctgcggcaatccaggtgccggcccaaaataagcggagagaagggagacgtggaggcgagcaaaacgaagcaaagacggcgtgacgcacgcctcgctcacgaacggcaccagcacgcgccatcgtgaagcgattgcaaggaatttgcccccaggcaggattgaactaccgaccttccgcttactaagcgggtgctctaccactgagctataggggctcttacaaccgaacgcagcgaccactttttcaccaccttccaaatcaacaaccaaacaccacaccaccagaaacgcatcacacacacctcccacgcaccacaacacaccctctcacgcactaccagtcgccgccgaccacgcaccgccgagatacaccacctctcgctgatcgacccagctcaggacaccctctcgctgcggtcgcagacgcagcccacgaagcggtcttttcgcacaacgaaccgcctcacacgcccaccgcacacgtgtactccgcgatgcaaccgacgaaccaaaccgcaaacggatcatacagctttggacagtcacagcaaaccccaaggagactgggcatttcggtcatccagccaaacaagcgaacgtgagctgcgggccaatcgggaatcggacgacccggaagacccagcggctcggtgccggaacggagcggctttcaagggtcaccgagaacaaagcgacaaagcaagaagcgcggtcgtccacacagacggttatttggacgctgaggcgggtatgctgtagccagtgctatgaggaggcagtggtggctgcggcaatccaggtgccggcccaaaataagcggagagaagggagacgtggaggcgagcaaaacgaagcaaagacggcgtgacgcacgcctcgctcacgaacggcaccagcacgcgccatcgtgaagcgattgcaaggaatttgcccccaggcaggattgaactaccgaccttccgcttactaagcgggtgctctaccactgagctataggggctcttacaaccgaacgcagcgaccactttttcaccaccttccaaatcaacaaccaaacaccacaccaccagaaacgcatcacacacacctcccacgcaccacaacacaccctctcacgcactaccagtcgccgccgaccacgcaccgccgagatacaccacctctcgctgatcgacccagctcaggacaccctctcgctgcggtcgcagacgcagcccacgaagcggtcttttcgcacaacgaaccgcctcacacgcccaccgcacacgtgtactccgcgatgcaaccgacgaaccaaaccgcaaacggatcatacagctttggacagtcacagcaaaccccaaggagactgggcatttcggtcatccagccaaacaagcgaacgtgagctgcgggccaatcgggaatcggacgacccggaagacccagcggctcggtgccggaacggagcggctttcaagggtcaccgagaacaaagcgacaaagcaagaagcgcggtcgtccacacagacggttatttggacgctgaggcgggtatgctgtagccagtgctatgaggaggcagtggtggctgcggcaatccaggtgccggcccaaaataagcggagagaagggagacgtggaggcgagcaaaacgaagcaaagacggcgtgacgcacgcctcgctcacgaacggcaccagcacgcgccatcgtgaagcgattgcaaggaatttgcccccaggcaggattgaactaccgaccttccgcttactaagcgggtgctctaccactgagctataggggctcttacaaccgaacgcagcgaccactttttcaccaccttccaaatcaacaaccaaacaccacaccaccagaaacgcatcacacacacctcccacgcaccacaacacaccctctcacgcactaccagtcgccgccgaccacgcaccgccgagatacaccacctctcgctgatcgacccagctcaggacaccctctcgctgcggtcgcagacgcagcccacgaagcggtcttttcgcacaacgaaccgcctcacacgcccaccgcacacgtgtactccgcgatgcaaccgacgaaccaaaccgcaaacggatcgtacagctttggacagtcagagcaaaccccaaggagactgggcatttcggtcatcagccaaacaagcgaacgtgagctgcgggccaatcgggaatcggacggcccggaagacccagcggctcggtgccggaacggagcggctttcaaggatcaccgagaacaaagcgacaaagcaagaagcgcggtcgtccacacagacggttatttggacgctgaggcgggtatgctgtagccagtgctatgaggaggcagtggtggctgcggcaatccaggtgccggcctaagataagcggagagaagggagacgtggaggcgagcaaaacgaagcaaagacggcgtgacgcacgcctcgctcacgaacggcaccagcacgcgccatcgtgaagcgattgcaaggaatttgcccccaggcaggattgaactaccgaccttccgcttactaagcgggtgctctaccactgagctataggggctcttacaaccgaacgcagcgaccactttttcaccaccttccaaatcaacaaccaaacaccacaccaccagaaacgcatcacacacacctcccacgcaccacaacacaccctctcacgcactaccagtcgccgccgaccacgcaccgccgagatacaccacctctcgctgatcgacccagctcaggacaccctctcgctgcggtcgcagacgcagcccacgaagcggtcttttcgcacaacgaaccgcctcacacgcccaccgcacacgtgcactcggcgatgcaaccgacgaaccaaaccgcaaacggatcatacagctttggacagtcagagcaaaccccaaggagactgggcatttcggtcatccagccaaacaagcgaacgtgagctgcgggccaatcgggaatcggacggcccggaagacccagcggctcggtgccggaacggagcggctttcaaggatcaccgagaacaaagcgacaaagcaagaagcgcggtcgtccacacagacggttattggacgctgaggcgggtatgctgtagccagtgctatgaggaggcagtggtggctgcggcaatccaggtgccggcctaagataagcggagagaagggagacgtggaggcgagcaaaacgaaacaaagacggcgtgacgcacgcctcgctcacgaacggcaccagcacgcgccatcgtgaagcgattgcaaggaatttgcccccaggcaggattgaactaccgaccttccgcttactaagcgggtgctctaccactgagctataggggctcttacaaccgaacgcagcgaccactttttcaccaccttccaaatcaacaaccaaacaccacaccaccagaaacgcatcacacacacctcccacgcaccacaacacaccctctcacgcactaccagtcgccgccgaccacgcatcgccgagatacaccacctctcgctgatcgacccagctcaggacaccctctcgctgcggtcgcagacgcagcccacgaagcggtcttttcgcacaacgaaccgcctcacacgcccaccgcacacgtgtactccgcgatgcaaccgacgaaccaaaccgcaaacggatcatacagctttggacagtcagagcaaaccccaaggagactgggcatttcggtcatccagccaaacaagcgaacgtgagctgcgggccaatcgggaatcggacggcccggaagacccagcggctcggtgccggaacggagcggctttcaaggatcaccgagaacaaagcgacaagccaagaagcgcggtcgtccacacagacggttatttggacgctgaggcgggtatgctgtagccagtgctatgaggaggcagtggtggctgcggcaatccaggtgccggcctaagataagcggagagaagggagacgtggaggcgagcaaaacgaagcaaagacggcgtgacgcacgcctcgctcacgaacggcaccagcacgcgccatcgtgaagcgattgcaaggaatttgcccccaggcaggattgaactaccgaccttccgcttactaagcgggtgctctaccactgagctataggggctcttacaaccgaacgcagcgaccactttttcaccaccttccaaatcaacaaccaaacaccacaccaccagaaacgcatcacacacacctcccaggcaccacaacacaccctctcacgcactaccagtcgccgccgaccacgcatcgccgagatacaccacctctcgctgatcgacccagctcaggacaccctctcgctgcggtcgcagacgcagcccacgaagcggtcttttcgcacaacgaaccgcctcacacgcccaccgcacacgtgtactccgcgatgcaaccgacgaaccaaaccgcaaacggatcatacagctttggacagtcagagcaaaccccaaggagactgggcatttcggtcatccagccaaacaagcgaacgtgagctgcgggccaatcgggaatcggacgacccggaagacccagcggctcggtgccggaacggagcggctttcaaggatcaccgagaacaaagcgacaaagcaagaagcgcggtcgtccacacagacggttatttggacgctgaggcgggtatgctgtagccagtgctatgaggaggcagtggtggctgcggcaatccaggtgccggcccaaaataagcggagagaagggagacgtggaggcgagcaaaacgaagcaaagacggcgtgacgcacgcctcgctcacgaacggcaccagcacgcgccatcgtgaagcgattgcaaggaatttgcccccaggcaggattgaactaccgaccttccgcttactaagcgggtgctctaccactgagctataggggctcttacaaccgaacgcagcgaccactttttcaccaccttccaaatcaacaaccaaacaccacaccaccagaaacgcatcacacacacctcccacgcaccacaacacaccctctcacgcactaccagtcgccgccgaccacgcaccgccgagatacaccacctctcgctgatcgacccagctcaggacaccctctcgctgcggtcgcagacgcagcccacgaagcggtcttttcgcacaacgaaccgcctcacacgcccaccgcacacgtgtactccgcgatgcaaccgacgaaccaaaccgcaaacggatcatacagctttggacagtcacagcaaaccccaaggagactgggcatttcggtcatcagccaaacaagcgaacgtgagctgcgggccaatcgggaatcggacggcccggaagacccagcggctcggtgccggaacggagcggctttcaaggatcaccgagaacaaagcgacaaagcaagaagcgcggtcgtccacacagacggttatttggacgctgaggcgggtatgctgtagccagtgctatgaggaggcagtggtggctgcggcaatccaggtgccggcccaaaataagcggagagaagggagacgtggaggcgagcaaaacgaagcaaagacggcgtgacgcacgcctcgctcacgaacggcaccagcacgcgccatcgtgaagcgattgcaaggaatttgcccccaggcaggattgaactaccgaccttccgcttactaagcgggtgctctaccactgagctataggggctcttacaaccgaacgcagcgaccactttttcaccaccttccaaatcaacaaccaaacaccacaccaccagaaacgcatcacacacacctcccacgcaccacaacacaccctctcacgcactaccagtcgccgccgaccacgcaccgccgagatacaccacctctcgctgatcgacccagctcaggacaccctctcgctgcggtcgcagacgcagcccacgaagcggtcttttcgcacaacgaaccgcctcacacgcccaccgcacacgtgcactcggcgatgcaaccgacgaaccaaaccgcaaacggatcatacagctttggacagtcacagcaaaccccaaggagactgggcatttcggtcatccagccaaacaagcgaacgtgagctgcgggccaatcgggaatcggacggcccggaagacccagcggctcggtgccggaacggagcggctttcaaggatcaccgagaacaaagcgacaaagcaagaagcgcggtcgtccacacagacggttatttggacgctgaggcgggtatgctgtagccagtgctatgaggaggcagtggtggctgcggcaatccaggtgccggcctaagataagcggagagaagggagacgtggaggcgagcaaaacgaagcaaagacggcgtgacgcacgcctcgctcacgaacggcaccagcacgcgccatcgtgaagcgattgcaaggaatttgcccccaggcaggattgaactaccgaccttccgcttactaagcgggtgctctaccactgagctataggggctcttacaaccgaacgcagcgaccactttttcaccaccttccaaatcaacaaccaaacaccacaccaccagaaacgcatcacacacacctcccacgcaccacaacacaccctctcacgcactaccagtcgccgccgaccacgcatcgccgagatacaccacctctcgctgatcgacccagctcaggacaccctctcgctgcggtcgcagacgcagcccacgaagcggtcttttcgcacaacgaaccgcctcacacgcccaccgcacacgtgcactccgcgatgcaaccgacgaaccaaaccgcaaacggatcatacagctttggacagtcagagcaaaccccaaggagactgggcatttcggtcatccagccaaacaagcgaacgtgagctgcgggccaatcgggaatcggacggcccggaagacccagcggctcggtgccggaacggagcggctttcaaggatcaccgagaacaaagcgacaagccaagaagcgcggtcgtccacacagacggttatttggacgctgaggcgggtatgctgtagccagtgctatgaggaggcagtggtggctgcggcaatccaggtgccggcctaagataagcggagagaagggagacgtggaggcgagcaaaacgaagcaaagacggcgtgacgcacgcctcgctcacgaacggcaccagcacgcgccatcgtgaagcgattgcaaggaatttgcccccaggcaggattgaactaccgaccttccgcttactaagcgggtgctctaccactgagctataggggctcttacaaccgaacgcagcgaccactttttcaccaccttccaaatcaacaaccaaacaccacaccaccagaaacgcatcacacacacctcccacgcaccacaacacaccctctcacgcactaccagtcgccgccgaccacgcatcgccgagatacaccacctctcgctgatcgacccagctcaggacaccctctcgctgcggtcgcagacgcagcccacgaagcggtcttttcgcacaacgaaccgcctcacacgcccaccgcacacgtgtactccgcgatgcaaccgacgaaccaaaccgcaaacggatcatacagctttggacagtcagagcaaaccccaaggagactgggcatttcggtcatccagccaaacaagcgaacgtgagctgcgggccaatcgggaatcggacggcccggaagacccagcggctcggtgccggaacggagcggctttcaaggatcaccgagaacaaagcgacaaagcaagaagcgcggtcgtccacacagacggttatttggacgctgaggcgggtatgctgtagccagtgctatgaggaggcagtggtggctgcggcaatccaggtgccggcctaagataagcggagagaagggagacgtggaggcgagcaaaacgaagcaaagacggcgtgacgcacgcctcgctcacgaacggcaccagcacgcgccatcgtgaagcgattgcaaggaatttgcccccaggcaggattgaactaccgaccttccgcttactaagcgggtgctctaccactgagctataggggctcttacaaccgaacgcagcgaccaccttccaaatcaacaaccaaacaccacaccaccagaaacgcatcacacacacctcccacgcaccacaacacaccctctcacgcactaccagtcgccgccgaccacgcatcgccgagatacaccacctctcgctgatcgacccagctcaggacaccctctcgctgcggtcgcagacgcagcccacgaagcggtcttttcgcacaacgaaccgcctcacacgcccaccgcacacgtgtactccgcgatgcaaccgacgaaccaaaccgcaaacggatcatacagctttggacagtcagagcaaaccccaaggagactgggcatttcggtcatccagccaaacaagcgaacgtgagctgcgggccaatcgggaatcggacgacccggaagacccagcggctcggtgccggaacggagcggctttcaaggatcaccgagaacaaagcgacaaagcaagaagcgcggtcgtccacacagacggttatttggacgctgaggcgggtatgctgtagccagtgctatgaggaggcagtggtggctgcggcaatccaggtgccggcctaagataagcggagagaagggagacgtggaggcgagcaaaacgaagcaaagacggcgtgacgcacgcctcgctcacgaacggcaccagcacgcgccatcgtgaagcgattgcaaggaatttgcccccaggcaggattgaactaccgaccttccgcttactaagcgggtgctctaccactgagctataggggctcttacaaccgaacgcagcgaccactttttcaccaccttccaaatcaacaaccaaacaccacaccaccagaaacgcatcacacacacctcccacgcaccacaacacaccctctcacgcactaccagtcgccgccgaccacgcatcgccgagatacaccacctctcgctgatcgacccagctcaggacaccctctcgctgcggtcgcagacgcagcccacgaagcggtcttttcgcacaacgaaccgcctcacacgcccaccgcacacgtgtactccgcgatgcaaccgacgaaccaaaccgcaaacggatcatacagctttggacagtcagagcaaaccccaaggagactgggcatttcggtcatccagccaaacaagcgaacgtgagctgcgggccaatcgggaatcggacgacccggaagacccagcggctcggtgccggaacggagcggctttcaagggtcaccgagaacaaagcgacaaagcaagaagcgcggtcgtccacacagacggttatttggacgctgaggcgggtatgctgtagccagtgctatgaggaggcagtggtggctgcggcaatccaggtgccggcccaaaataagcggagagaagggagacgtggaggcgagcaaaacgaagcaaagacggcgtgacgcacgcctcgctcacgaacggcaccagcacgcgccatcgtgaagcgattgcaaggaatttgcccccaggcaggattgaactaccgaccttccgcttactaagcgggtgctctaccactgagctataggggctcttacaaccgaacgcagcgaccactttttcaccaccttccaaatcaacaaccaaacaccacaccaccagaaacgcatcacacacacctcccacgcaccacaacacaccctctcacgcactaccagtcgccgccgaccacgcaccgccgagatacaccacctctcgctgatcgacccagctcaggacaccctctcgctgcggtcgcagacgcagcccacgaagcggtcttttcgcacaacgaaccgcctcacacgcccaccgcacacgtgtactccgcgatgcaaccgacgaaccaaaccgcaaacggatcgtacagctttggacagtcagagcaaaccccaaggagactgggcatttcggtcatcagccaaacaagcgaacgtgagctgcgggccaatcgggaatcggacgacccggaagacccagcggctcggtgccggaacggagcggctttcaaggatcaccgagaacaaagcgacaaagcaagaagcgcggtcgtccacacagacggttatttggacgctgaggcgggtatgctgtagccagtgctatgaggaggcagtggtggctgcggcaatccaggtgccggcccaaaataagcggagagaagggagacgtggaggcgagcaaaacgaagcaaagacggcgtgacgcacgcctcgctcacgaacggcaccagcacgcgccatcgtgaagcgattgcaaggaatttgcccccaggcaggattgaactaccgaccttccgcttactaagcgggtgctctaccactgagctataggggctcttacaaccgaacgcagcgaccactttttcaccaccttccaaatcaacaaccaaacaccacaccaccagaaacgcatcacacacacctcccacgcaccacaacacaccctctcacgcactaccagtcgccgccgaccacgcaccgccgagatacaccacctctcgctgatcgacccagctcaggacaccctctcgctgcggtcgcagacgcagcccacgaagcggtcttttcgcacaacgaaccgcctcacacgcccaccgcacacgtgtactccgcgatgcaaccgacgaaccaaaccgcaaacggatcatacagctttggacagtcagagcaaaccccaaggagactgggcatttcggtcatccagccaaacaagcgaacgtgagctgcgggccaatcgggaatcggacggcccggaagacccagcggctcggtgccggaacggagcggctttcaaggatcaccgagaacaaagcgacaaagcaagaagcgcggtcgtccacacagacggttatttggacgctgaggcgggtatgctgtagccagtgctatgaggaggcagtggtggctgcggcaatccaggtgccggcctaagataagcggagagaagggagacatggaggcgagcaaaacgaagcaaagacggcgtgacgcacgcctcgctcacgaacggcaccagcacgcgccatcgtgaagcgattgcaaggaatttgcccccaggcaggattgaactaccgaccttccgcttactaagcgggtgctctaccactgagctataggggctcttacaaccgaacgcagcgaccactttttcaccaccttccaaatcaacaaccaaacaccacaccaccagaaacgcatcacacacacctcccacgcaccacaacacaccctctcacgcactaccagtcgccgccgaccacgcaccgccgagatacaccacctctcgctgatcgacccagctcaggacaccctctcgctgcggtcgcagacgcagcccacgaagcggtcttttcgcacaacgaaccgcctcacacgcccaccgcacacgtgtactccgcgatgcaaccgacgaaccaaaccgcaaacggatcatacagctttggacagtcagagcaaaccccaaggagactgggcatttcggtcatccagccaaacaagcgaacgtgagctgcgggccaatcgggaatcggacggcccggaagacccagcggctcggtgccggaacggagcggctttcaaggatcaccgagaacaaagcgacaaagcaagaagcgcggtcgtccacacagacgggtttttggacgctgaggcgggtatgctgtagccagtgctatgaggaggcagtggtggctgcggcaatccaggtgccggcctaagataagcggagagaagggagacgtggaggcgagcaaaacgaagcaaagacggcgtgacgcacgcctcgctcacgaacggcaccagcacgcgccatcgtgaagcgattgcaaggaatttgcccccaggcaggattgaactaccgaccttccgcttactaagagcctgttcgctacgnnnnnnnnnnnnnnnnnnnnnnnnnnnnnnnnnnnnnnnnnnnnnnnnnnnnnnnnnnnnnnnnnnnnnnnnnnnnnnnnnnnnnnnnnnnnnnnnnnnnnnnnnnnnnnnnnnnnnnnnnnnnnnnnnnnnnnnnnnnnnnnnnnnnnnnnnnnnnnnnnnnnnnnnnnnnnnnnnnnnnnnnnnnnnnnnnnnnnnnnnnnnnnnnnnnnnnnnnnnnnnnnnnnnnnnnnnnnnnnnnnnnnnnnnnnnnnnnnnnnnnnnnnnnnnnnnnnnnnnnnnnnnnnnnnnnnnnnnnnnnnnnnnnnnnnnnnnnnnnnnnnnnnnnnnnnnnnnnnnnnnnnnnnnnnnnnnnnnnnnnnnnnnnnnnnnnnnnnnnnnnnnnnnnnnnnnnnnnnnnnnnnnnnnnnnnnnnnnnnnnnnnnnnnnnnnnnnnnnnnnnnnnnnnnnnnnnnnnnnnnnnnnnnnnnnnnnnnnnnnnnnnnnnnnnnnnnnnnnnnnnnnnnnnnnnnnnnnnnnnnnnnnnnnnnnnnnnnnnnnnnnnnnnnnnnnnnnnnnnnnnnnnnnnnnnnnnnnnnnnnnnnnnnnnnnnnnnnnnnnnnnnnnnnnnnnnnnnnnnnnnnnnnnnnnnnnnnnnnnnnnnnnnnnnnnnnnnnnnnnnnnnnnnnnnnnnnnnnnnnnnnnnnnnnnnnnnnnnnnnnnnnnnnnnnnnnnnnnnnnnnnnnnnnnnnnnnnnnnnnnnnnnnnnnnnnnnnnnnnnnnnnnnnnnnnnnnnnnnnnnnnnnnnnnnnnnnnnnnnnnnnnnnnnnnnnnnnnnnnnnnnnnnnnnnnnnnnnnnnnnnnnnnnnnnnnnnnnnnnnnnnnnnnnnnnnnnnnnnnnnnnnnnnnnnnnnnnnnnnnnnnnnnnnnnnnnnnnnnnnnnnnnnnnnnnnnnnnnnnnnnnnnnnnnnnnnnnnnnnnnnnnnnnnnnnnnnnnnnnnnnnnnnnnnnnnnnnnnnnnnnnnnnnnnnnnnnnnnnnnnnnnnnnnnnnnnnnnnnnnnnnnnnnnnnnnnnnnnnnnnnnnnnnnnnnnnnnnnnnnnnnnnnnnnnnnnnnnnnnnnnnnnnnnnnnnnnnnnnnnnnnnnnnnnnnnnnnnnnnnnnnnnnnnnnnnnnnnnnnnnnnnnnnnnnnnnnnnnnnnnnnnnnnnnnnnnnnnnnnnnnnnnnnnnnnnnnnnnnnnnnnnnnnnnnnnnnnnnnnnnnnnnnnnnnnnnnnnnnnnnnnnnnnnnnnnnnnnnnnnnnnnnnnnnnnnnnnnnnnnnnnnnnnnnnnnnnnnnnnnnnnnnnnnnnnnnnnnnnnnnnnnnnnnnnnnnnnnnnnnnnnnnnnnnnnnnnnnnnnnnnnnnnnnnnnnnnnnnnnnnnnnnnnnnnnnnnnnnnnnnnnnnnnnnnnnnnnnnnnnnnnnnnnnnnnnnnnnnnnnnnnnnnnnnnnnnnnnnnnnnnnnnnnnnnnnnnnnnnnnnnnnnnnnnnnnnnnnnnnnnnnnnnnnnnnnnnnnnnnnnnnnnnnnnnnnnnnnnnnnnnnnnnnnnnnnnnnnnnnnnnnnnnnnnnnnnnnnnnnnnnnnnnnnnnnnnnnnnnnnnnnnnnnnnnnnnnnnnnnnnnnnnnnnnnnnnnnnnnnnnnnnnnnnnnnnnnnnnnnnnnnnnnnnnnnnnnnnnnnnnnnnnnnnnnnnnnnnnnnnnnnnnnnnnnnnnnnnnnnnnnnnnnnnnnnnnnnnnnnnnnnnnnnnnnnnnnnnnnnnnnnnnnnnnnnnnnnnnnnnnnnnnnnnnnnnnnnnnnnnnnnnnnnnnnnnnnnnnnnnnnnnnnnnnnnnnnnnnnnnnnnnnnnnnnnnnnnnnnnnnnnnnnnnnnnnnnnnggctttcagggtcaccgagaacaaagcgacaaagcaagaagcgcggtcgtccacacagacggttatttggacgctgaggcgggtatgctgtagccagtgctatgaggaggcagtggtggctgcggcaatccaggtgccggcccaaaataagcggagagaagggagacgtggaggcgagcaaaacgaagcaaagacggcgtgacgcacgcctcgctcacgaacggcaccagcacgcgccatcgtgaagcgattgcaaggaatttgcccccaggcaggattgaactaccgaccttccgcttactaagcgggtgctctaccactgagctataggggctcttacaaccgaacgcagcgaccactttttcaccaccttccaaatcaacaaccaaacaccacaccaccagaaacgcatcacacacacctcccacgcaccacaacacaccctctcacgcactaccagtcgccgccgaccacgcaccgccgagatacaccacctctcgctgatcgacccagctcaggacaccctctcgctgcggtcgcagacgcagcccacgaagcggtcttttcgcacaacgaaccgcctcacacgcccaccgcacacgtgtactccgcgatgcaaccgacgaaccaaaccgcaaacggatcatacagctttggacagtcacagcaaaccccaaggagactgggcatttcggtcatccagccaaacaagcgaacgtgagctgcgggccaatcgggaatcggacggcccggaagacccagcggctcggtgccggaacggagcggctttcaaggatcaccgagaacaaagcgacaaagcaagaagcgcggtcgtccacacagacggttatttggacgctgaggcgggtatgctgtagccagtgctatgaggaggcagtggtggctgcggcaatccaggtgccggcccaaaataagcggagagaagggagacgtggaggcgagcaaaacgaagcaaagacggcgtgacgcacgcctcgctcacgaacggcaccagcacgcgccatcgtgaagcgattgcaaggaatttgcccccaggcaggattgaactaccgaccttccgcttactaagcgggtgctctaccactgagctataggggctcttacaaccgaacgcagcgaccactttttcaccaccttccaaatcaacaaccaaacaccacaccaccagaaacgcatcacacacacctcccacgcaccacaacacaccctctcacgcactaccagtcgccgccgaccacgcatcgccgagatacaccacctctcgctgatcgacccagctcaggacaccctctcgctgcggtcgcagacgcagcccacgaagcggtcttttcgcacaacgaaccgcctcacacgcccaccgcacacgtgcactccgcgatgcaaccgacgaaccaaaccgcaaacggatcatacagctttggacagtcagagcaaaccccaaggagactgggcatttcggtcatccagccaaacaagcgaacgtgagctgcgggccaatcgggaatcggacggcccggaagacccagcggctcggtgccggaacggagcggctttcaaggatcaccgagaacaaagcgacaaagcaagaagcgcggtcgtccacacagacggttatttggacgctgaggcgggtatgctgtagccagtgctatgaggaggcagtggtggctgcggcaatccaggtgccggcctaagataagcggagagaagggagacgtggaggcgagcaaaacgaagcaaagacggcgtgacgcacgcctcgctcacgaacggcaccagcacgcgccatcgtgaagcgattgcaaggaatttgcccccaggcaggattgaactaccgaccttccgcttactaagcgggtgctctaccactgagctataggggctcttacaaccgaacgcagcgaccactttttcaccaccttccaaatcaacaaccaaacaccacaccaccagaaacgcatcacacacacctcccacgcaccacaacacaccctctcacgcactaccagtcgccgccgaccacgcaccgccgagatacaccacctctcgctgatcgacccagctcaggacaccctctcgctgcggtcgcagacgcagcccacgaagcggtcttttcgcacaacgaaccgcctcacacgcccaccgcacacgtgtactccgcgatgcaaccgacgaaccaaaccgcaaacggatcatacagctttggacagtcagagcaaaccccaaggagactgggcatttcggtcatccagccaaacaagcgaacgtgagctgcgggccaatcgggaatcggacggcccggaagacccagcggctcggtgccggaacggagcggctttcaaggatcaccgagaacaaagcgacaaagcaagaagcgcggtcgtccacacagacggttatttggacgctgaggcgggtatgctgtagccagtgctatgaggaggcagtggtggctnnnnnnnnnnnnnnnnnnnnnnnnnnnnnnnnnnnnnnnnnnnnnnnnnnnnnnnnnnnnnnnnnnnnnnnnnnnnnnnnnnnnnnnnnnnnnnnnnnnnnnnnnnnnnnnnnnnnnnnnnnnnnnnnnnnnnnnnnnnnnnnnnnnnnnnnnnnnnnnnnnnnnnnnnnnnnnnnnnnnnnnnnnnnnnnnnnnnnnnnnnnnnnnnnnnnnnnnnnnnnnnnnnnnnnnnnnnnnnnnnnnnnnnnnnnnnnnnnnnnnnnnnnnnnnnnnnnnnnnnnnnnnnnnnnnnnnnnnnnnnnnnnnnnnnnnnnnnnnnnnnnnnnnnnnnnnnnnnnnnnnnnnnnnnnnnnnnnnnnnnnnnnnnnnnnnnnnnctcacgcactaccagtcgccgccgaccacgcaccgccgagatacaccacctctcgctgatcgacccagctcaggacaccctctcgctgcggtcgcagacgcagcccacgaagcggtcttttcgcacaacgaaccgcctcacacgcccaccgcacacgtgtactccgcgatgcaaccgacgaaccaaaccgcaaacggatcatacagctttggacagtcacagcaaaccccaaggagactgggcatttcggtcatcagccaaacaagcgaacgtgagctgcgggccaatcgggaatcggacgacccggaagacccagcggctcggtgccggaacggagcggctttcaaggatcaccgagaacaaagcgacaaagcaagaagcgcggtcgtccacacagacggttatttggacgctgaggcgggtatgctgtagccagtgctatgaggaggcagtggtggctgcggcaatccaggtgccggcctaagataagcggagagaagggagacgtggaggcgagcaaaacgaagcaaagacggcgtgacgcacgcctcgctcacgaacggcaccagcacgcaccatcgtgaagcgattgcaaggaatttgcccccaggcaggattgaactaccgaccttccgcttactaagcgggtgctctaccactgagctataggggcccttacaaccgaacgcagcgaccactttttcaccaccttccaaatcaacaaccaaacaccacaccaccagaaacgcatcacacacacctcccacgcaccacaacacaccctctcacgcactaccagtcgccgccgaccacgcaccgccgagatacaccacctctcgctgatcgacccagctcaggacaccctctcgctgcggtcgcagacgcagcccacgaagcggtcttttcgcacaacgaaccgcctcacacgcccaccgcacacgtgtactccgcgatgcaaccgacgaaccaaaccgcaaacggatcatacagctttggacagtcacagcaaaccccaaggagactgggcatttcggtcatcagccaaacaagcgaacgtgagctgcgggccaatcgggaatcggacgacccggaagacccagcggctcggtgccggaacggagcggctttcaaggatcaccgagaacaaagcgacaaagcaagaagcgcggtcgtccacacagacggttatttggacgctgaggcgggtatgctgtagccagtgctatgaggaggcagtggtggctgcggcaatccaggtgccggcccaaaataagcggagagaagggagacgtggaggcgagcaaaacgaagcaaagacggcgtgacgcacgcctcgctcacgaacggcaccagcacgcgccatcgtgaagcgattgcaaggaatttgcccccaggcaggattgaactaccgaccttccgcttactaagcgggtgctctaccactgagctataggggctcttacaaccgaacgcagcgaccactttttcaccaccttccaaatcaacaaccaaacaccacaccaccagaaacgcatcacacacacctcccacgcaccacaacacaccctctcacgcactaccagtcgccgccgaccacgcaccgccgagatacaccacctctcgctgatcgacccagctcaggacaccctctcgctgcggtcgcagacgcagcccacgaagcggtcttttcgcacaacgaaccgcctcacacgcccaccgcacacgtgtactccgcgatgcaaccgacgaaccaaaccgcaaacggatcgtacagctttggacagtcagagcaaaccccaaggagactgggcatttcggtcatccagccaaacaagcgaacgtgagctgcgggccaatcgggaatcggacgacccggaagacccagcggctcggtgccggaacggagcggctttcaaggatcaccgagaacaaagcgacaaagcaagaagcgcggtcgtccacacagacggttatttggacgctgaggcgggtatgctgtagccagtgctatgaggaggcagtggtggctgcggcaatccaggtgccggcctaagataagcggagagaagggagacgtggaggcgagcaaaacgaagcaaagacggcgtgacgcacgcctcgctcacgaacggcaccagcacgcaccatcgtgaagcgattgcaaggaatttgcccccaggcaggattgaactaccgaccttccgcttactaagcgggtgctctaccactgagctataggggctcttacaaccgaacgcagcgaccactttttcaccaccttccaaatcaacaaccaaacaccacaccaccagaaacgcatcacacacacctcccacgcaccacaacacaccctctcacgcactaccagtcgccgccgaccacgcaccgccgagatacaccacctctcgctgatcgacccagctcaggacaccctctcgctgcggtcgcagacgcagcccacgaagcggtcttttcgcacaacgaaccgcctcacacgcccaccgcacacgtgtactccgcgatgcaaccgacgaaccaaaccgcaaacggatcatacagctttggacagtcacagcaaaccccaaggagactgggcatttcggtcatcagccaaacaagcgaacgtgagctgcgggccaatcgggaatcggacgacccggaagacccagcggctcggtgccggaacggagcggctttcaaggatcaccgagaacaaagcgacaaagcaagaagcgcggtcgtccacacagacggttatttggacgctgaggcgggtatgctgtagccagtgctatgaggaggcagtggtggctgcggcaatccaggtgccggcctaagataagcggagagaagggagacgtggaggcgagcaaaacgaagcaaagacggcgtgacgcacgcctcgctcacgaacggcaccagcacgcgccatcgtgaagcgattgcaaggaatttgcccccaggcaggattgaactaccgaccttccgcttactaagcgggtgctctaccactgagctataggggctcttacaaccgaacgcagcgaccactttttcaccaccttccaaatcaacaaccaaacaccacaccaccagaaacgcatcacacacacctcccacgcaccacaacacaccctctcacgcactaccagtcgccgccgaccacgcaccgccgagatacaccacctctcgctgatcgacccagctcaggacaccctctcgctgcggtcgcagacgcagcccacgaagcggtcttttcgcacaacgaaccgcctcacacgcccaccgcacacgtgtactccgcgatgcaaccgacgaaccaaaccgcaaacggatcatacagctttggacagtcacagcaaaccccaaggagactgggcatttcggtcatccagccaaacaagcgaacgtgagctgcgggccaatcgggaatcggacggcccggaagacccagcggctcggtgccggaacggagcggctttcaaggatcaccgagaacaaagcgacaaagcaagaagcgcggtcgtccacacagacggttatttggacgctgaggcgggtatgctgtagccagtgctatgaggaggcagtggtggctgcggcaatccaggtgccggcctaagataagcggagagaagggagacgtggaggcgagcaaaacgaagcaaagacggcgtgacgcacgcctcgctcacgaacggcaccagcacgcgccatcgtgaagcgattgcaaggaatttgcccccaggcaggattgaactaccgaccttccgcttactaagcgggtgctctaccactgagctataggggctcttacaaccgaacgcagcgaccactttttcaccaccttccaaatcaacaaccaaacaccacaccaccagaaacgcatcacacacacctcccacgcaccacaacacaccctctcacgcactaccagtcgccgccgaccacgcaccgccgagatacaccacctctcgctgatcgacccagctcaggacaccctctcgctgcggtcgcagacgcagcccacgaagcggtcttttcgcacaacgaaccgcctcacacgcccaccgcacacgtgtactccgcgatgcaaccgacgaaccaaaccgcaaacggatcatacagctttggacagtcagagcaaaccccaaggagactgggcatttcggtcatccagccaaacaagcgaacgtgagctgcgggccaatcgggaatcggacggcccggaagacccagcggctcggtgccggaacggagcggctttcaaggatcaccgagaacaaagcgacaagccaagaagcgcggtcgtccacacagacggttatttggacgctgaggcgggtatgctgtagccagtgctatgaggaggcagtggtggctgcggcaatccaggtgccggcctaagataagcggagagaagggagacgtggaggcgagcaaaacgaagcaaagacggcgtgacgcacgcctcgctcacgaacggcaccagcacgcgccatcgtgaagcgattgcaaggaatttgcccccaggcaggattgaactaccgaccttccgcttactaagcgggtgctctaccactgagctataggggctcttacaaccgaacgcagcgaccactttttcaccaccttccaaatcaacaaccaaacaccacaccaccagaaacgcatcacacacacctcccacgcaccacaacacaccctctcacgcactaccagtcgccgccgaccacgcaccgccgagatacaccacctctcgctgatcgacccagctcaggacaccctctcgctgcggtcgcagacgcagcccacgaagcggtcttttcgcacaacgaaccgcctcacacgcccaccgcacacgtgtactccgcgatgcaaccgacgaaccaaaccgcaaacggatcatacagctttggacagtcagagcaaaccccaaggagactgggcatttcggtcatccagccaaacaagcgaacgtgagctgcgggccaatcgggaatcggacggcccggaagacccagcggctcggtgccggaacggagcggctttcaaggatcaccgagaacaaagcgacaaagcaagaagcgcggtcgtccacacagacgggtttttggacgctgaggcgggtatgctgtagccagtgctatgaggaggcagtggtggctgcggcaatccaggtgccggcctaagataagcggagagaagggagacgtgagcgagcaaaacgaagcaaagacggcgtgacgcacgcctcgctcacgaacggcaccagcacgcgccatcgtgaagcgattgcaaggaatttgcccccaggcaggattgaactaccgaccttccgcttactaagcgggtgctctaccactgagctataggggctcttacaaccgaacgcagcgaccactttttcaccaccttccaaatcaacaaccaaacaccacaccaccagaaacgcatcacacacacctcccacgcaccacaacacaccctctcacgcactaccagtcgccgccgaccacgcaccgccgagatacaccacctctcgctgatcgacccagctcaggacaccctctcgctgcggtcgcagacgcagcccacgaagcggtcttttcgcacaacgaaccgcctcacacgcccaccgcacacgtgtactccgcgatgcaaccgacgaaccaaaccgcaaacggatcatacagctttggacagtcagagcaaaccccaaggagactgggcatttcggtcatccagccaaacaagcgaacgtgagctgcgggccaatcgggaatcggacggcccggaagacccagcggctcggtgccggaacggagcggctttcaaggatcaccgagaacaaagcgacaaagcaagaagcgcggtcgtccacacagacggttatttggacgctgaggcgggtatgctgtagccagtgctatgaggaggcagtggtggctgcggcaatccaggtgccggcccaaaataagcggagagaagggagacgtggaggcgagcaaaacgaagcaaagacggcgtgacgcacgcctcgctcacgaacggcaccagcacgcgccatcgtgaagcgattgcaaggaatttgcccccaggcaggattgaactaccgaccttccgcttactaagcgggtgctctaccactgagctataggggctcttacaaccgaacgcagcgaccactttttcaccaccttccaaatcaacaaccaaacaccacaccaccagaaacgcatcacacacacctcccacgcaccacaacacaccctctccactgttggaatcattccggactcgtaggtaaagctgctcttcagttgattttgaaataactaaatcagtacattggaaaagcaaactcaacctaacatcaatttatatattctgcgtctttatatatatcaggcgttccttactcgggcagattactgtagtagggcaaactggatgcaaagcacaatatatgagtcatatactatgactcatatgatatgagtactaacatttgatactacctccacacctatcggggggccttccttgctttgatttgtgctgaagacgcgcaccgaaaccgcctcgctattcgttgcgggcgtcgaagctgacctgatggattatctgtttttcccctgtcgagtctgaatgagttggagaagcagtacactgcgattcttccatgccgaccttataccagcggctccatgttccggcgagctcttgtcgttgatgtagacggtgcacggcgtcgaagcacctcgtcagagctttggcaactgtgctgtgtttatcatttgcgtcatcatccgtagcattgggagcacaagcaaactcagccgacgtgaccgagaagttgacagcttcgttcagcatttctcgaacttgctgcactctttgccgacgacgagctatcgactggctcgcaaactcaaaccactgacgaaatcgccttctgtactggcacatcgcgactcgttgaaagagtgcgcagcgctgtttacgatgccaagatctccatcccacccaaacagacagcacgaatagcttatcgtgtttcgtcagagcccgcgccaatttctggataaatggtcgttcacagtgttagtacaatgcagcgattactgtctaatgtatatatgagaccataccttcgctgcttggtggctacgacggacaacgacgagtgcttctgcttgctcgctgagctgctgggaataaaccattatcttccatcgagaaaacgcacatcggcgccgctgcctttgatcgactccgagtagccgatgcaaaaacacacgagaccgactgcaaaacgccttccacgccttaaatcggcacgcaacttcgctccaaattttgttcaccagcagcttgcggagcagaagtcgatgtcggtaacacaacgagccaccgtcatacacgcagaagttttggcctgaaacgaggtgcgcggccatgcagattccgacttgtacgcttcacttcgccacttgagcactggaatcgaatcatttcggtaacggagaggtagcatcgcacatagcaaccgccgcaaggggttcagagaggggtttattaatgtagcctgcccgtctaaaacttggacacgtcacggcctacgagaatcgccttaagccagtccagcggcacctgcatccggagccgccagcttcccagcttggtcaagtacgcgctacgccagaggaaccaggccttccacccgctgagcgtgattctgtcgtcgtcgcgggggtgggcctcgaaaaggccctcgtaagagcccaagtacgccatcatacccttgctctggaatgcgtacggcttggccggcgtcgggttcttgcctcgaagcagcgacgtaaggtagttggcttgcgtctgcgccttctgggccgtagctggcagcggataatcgagaatctcagcacagtcgccgatactgaacacgttcgagcggcgcggcattccccacggggccttctcttcgacctcagcggcgcccagcacctggcaatactggttagtgaggatgttcccgcgcttgctcttctcgaacaccgttagcgacttggtgagctcattgggacccactccagcagtccagaccacgagtccggcagggatcttctcgccgccctcgaccgtgacgccttcttccgtcacttcgatgcaattcttcttcacgatctccatcgtgctgcgcttctggatcttgcgcagcgccacagcacgcaggtgcttgtcgaagccgttgaggatctcgcccgagtccacgagcgtcacgcccaggtacttggacgtctgcgggtacttgtgcacgaggtcctgcagcaccagatcgtagagctcggcgcagaactcgatgcccgtggggcctccgcccaccaccacgaagtgcagcagccgctgcttctcctcgggcgtcacgccgcgctgcgtggccgcctcgaagttctcgaggatgcggttgcggatcttctgcgcgtggctgatctccttgaggaagaaggcgtgctcctccacgcccggcagcccgaaggtcagcgggcgcgagccgcacgccagcaccagcgcgtcgtacttgatgtcgtacttgcggtggcggctcgcgtcgctgatggccgactccaccttgagcaccttttgctccggatctacgtcctgcacgttggccaggtggaagtcgctctcgtgactgaacatgctgtcacgcagcggctcgatgatggagcggaactcgagcgtccccacggtcgtgctggccagcagcggcgtgtacaggaagtgctgcagttgatacacacaccgtcggtaagccagccatagttgatcaaggctattgcagtggagacagacgtacgttgcgcttggagacgaccacgaggtccacgggtcggccgacgttctcctcaatgtccaccaggtgcttgcggcactgcgtgaagagctggtagccggcccagcccgtgcccacgatgacgagctggaagttctcgggcttcttgacgtcgtcctggcgcacggggtccagggacgacgcggcgcgcttccaccaggcggcgctggtgctgcgcgccgtcttggtcgcggtgacgagctggcggcccagcatgttgaggttaagatggagttgttggttggtcttgcggggaggcgaagcgaatctgaagtgagcctgaggctgaagcgcgtcggttcccaagcgtgggaacgggcgtgtggcatgaggaagttaggtacccaacaacaccccacacctcacctcgggcttaacactcgcgagttgttgatgccacgcacgcgctccgattggtttaacgcggcgcggcaccacacggcgcatgttggattgtcgatcctggatgatggccagcgacggagagaaaggcctggcgtgaacagggcggcgagcaactgagcaagcagcgtctgtgtatgtgcttgtattaattaatgcatgttggcgtcgtattgaggcggcacgcatgctccaacgggagcgaatacacttgcatcatgggcaggatgtaccttcggaacaaagtctgagagcgctggtttaccggtagcgacaattcgacgacatgctgtcgccgtgaacttgcgaccaccacaacagcgcccacgcaagaggaagccgcaaacaaaatccaagaagcaaaaataccgtaattccagagtgagctgagaatctcagctcactctggaattacggtatagccttctcaggctaatcgacgtgtttactaggtttttggcttcgtagtgtccgatgtcctgcttgcgggatacggagtgtggggctgttttttaaatcacaagttcgtccatggtgttcccaagcgaagtgaggcaccactttatgaacagccgagtatcccgacgcaaccaagcaggcccgttcagtgcaccagcactgtacaaagattcactcccaattgagaagcgagtggagattgatccgacggctgttgtacattccgatggcttctactgcccacgaccccggtgataagcgcgcattcgacatctccattctctggcgaagccgttctacatgcaaggggagagttccccaacagtgtgggtgtggagagcactatcgacgcaacgaaggcaagagaactacagggacaggtttgttaagctactcaagtccggtcactagccagtcaagcagccagctaaaaggagaacgacaggcgcctcatgctcttatcagtccggttttgattgacaatactagcaccaccgcagctattttgaaatacttcaacatgaaactagtgcatgggaactgttgcttcttgttttcgctgctgtattagcttgctctcagcttcatgaatcgatggacgaacctcataccctggtaagaagtccgcgtgcagtcacagcattgcgccgagaggcatggggtcgtccaacgacagttgcgtctcccacggagaccttcacgtctgggagttccgatgacgacgctaacccgaccacagtcggcccccgtgtggcacaagtaccagccgtgacttctgtagctccccaccaccatactcgtcgtcggcggtcaactggagacgctcagacggtcgcgtacatggagattcaaaacgtagcggagctcattcagaagaacctgttccgagcgcagacgtggattgatgcgctgcaggttatgcgtcttgtggtggtaaattgcatcccgagtatattttgtgcctggattactgtggttttttacgcggttggccctctgtggtctcctttcattccggtttggtcgtcgtcgatgtggtcggctccagtatttacaacttccatggcatcagccgagtttgacgccgttgtggggttctactttgttctaatcgcatgcttggctcacctcgtcacgaagtccttcactgtggggaatcgacttttcacgttttcagccggaatttggtcgctcgatccaaacgcacctgggttttcgagacttctcgcgcgaaatgtgatttcgacaagtgttcctctcgctatggcagtgtctagtggcgcatatttcatggaattactacgtttttatcgggtcgattaccgcaagtatgggcgaattgacgtctacgtgttgtgtgcgaccagctacgcgtacgttatgtatgcagaggtgcatttgcggctcaaactcattcggacagtgcgtcgatcacttgttttcctcccaagggcgtccgtaacgccggcaccgctcagtgtaattggacctgcgatggcaaaacctaccgtggatttctccatcgcccattctaagaacgtggggcctcgacgaatagtgaagttgggcgagcttatgttccagttactccgagctcaagctctgccggtggccacattccacatagctttcctatttcttcacaccgtagcggccttatcgctgcatgaacggtggcaggcgatacttctcgctggagccagccaagcgcttaagctcgcactacaagaggcggcgaagagactacaactgaatcgcacacaacaacgccattcagcgcgtatggtgcacactgttatgacggtacccaccatttgcatcgacactccgatccgactcgtgttcatgcaaaaaggtgtcaacagttcgtcgattatttccagctcgttggctctcgtgctcttcgatgtcctcttccgagtgacgaagatgttttatctccgctacacgctctcgtctcgactagccaactcgcggatcatcaagcgtctacttcaccgtgtcaattctcgactggaagcacgcgatgctattcgtgcacgagccgagtactcgcgctttctcgactggaagaactacaggcttcggttgcatgccgctgaaatttacgccgacatgcatgggaaatacatttccatcggactagctgttgcaatgctctacaccctccgctcccatccgcggtacgacttgggctacatgtcttcggcaacagacacccagttactcgcggcaaacgttcaactggccacaggcctgactgctgaccttatcgcctgtgcgttcgaagggattcaagaagtaccaatgtttgcaagtctagtggatgaaggcgcaccgctgcttcgctacctgcgtctgctaatgagtgtactcaccgcagttaatgttggagtcattgcactgtttgctatgagaccacaaatataatagcgaaataatgaacatggtacttaatcgcgtaaagatttgtttctcgaagtaaacttgagtatacgtatcgtcccgctgcagttgctccgccgagttcttgcgttgtactcaaagtaatgcggtgtagagcgtactctggacggtgccggccgtgacggcgttcctctggtcgtcattggctttcgctactacgacagtctgcagcttcttggccagcacctgctcgtacgcgtacgcttgcctggccaaccgcatccggttgaggattctaacgcggctggagacgatggagggccccaaggaagggtgacctggtgctcgagattcaatagcgacacgctgtaagcttattttgaaccaaggggctgcaacgtcgccatcactacgtcacacgttttcctcattgggtttctcgttgttctcgtgcttcgccttgcgtcgtcacgcagcaacgctcaagcatttgtgacgttcatgctgggtgtggtggggctggtggtgtgcatcaccggcagtctctcgattctcgaatccttcgtgaatgacgatgttcaaatcctctaccggaaactgctgatcgcgctgctagctattgtgtgggcatccgacacgggcacttacctagtcggcaaggctctcgttttcttcaactacccgttttacaacctgctcgctcgtcactagaacaagaattatgaaggcacactgcgagcgattgtctttaatattgtggctatggcggtggctggcctcggatattctgaatctcccggggtcgtttggcacgaaagtgacgtgcaccatcatcacagtggtcgattacgagatttacttaagtttgttgaagcgagctgcgggggtgaagggttcaggcaaattgatttcgcggtgcactggaccgcattgacgcactcatgttcgcctccatcgtcttctcccgctactacggactgcgcttttagtttgaagttaagtaaggaatgcccatgataatatctcactcagcttgggttattcattctcaccctcatccgaaaatggaatgcatctcgcgcttgaaatagtggtgcggtgcttgctgctttcaatgccaacagcggcattctctcttgtgactccatatgactcggcatcgatggtcttcctggctgatcgcaattatctcgttaggctcgttccatcgtacgcacgcagcgaattgggcccaggtcagcggcgcgaaacacacgaatgccgcggtgagagaaatcaccccctggacaagtcgccacggccatgcagtggcagctttggacttcagtgacgactacgtgcgctctacagggcaaaaggcgagactattcgtgctgggaggagactccaatgtgcagggctcccaagatctacgcgcatacccgggtggaggtgccatgcgcaacgacgtgtggagtacaacggggccgacctggaacgtccagacgaatatcctcaagactacgaagtggggagatccgctgccccaaatcgtggcgaatgtaacctggctgcagacgaataacgggaagcgtcctccgcgaggcatcacttactccgagtggatttcatgcgctgcagcggcctgggcagtcaatccaccctcgggatgcgacgaccccacaaaacctcctggagcttacctcgcagataatatgttctctccacgacggaacttcgtggcactcgccttccagaacgagttgttcgtattcgggggtcgggcgcgtgagcattttccagtccctcagtcacagctacgcggtggtacggggcctggcaccatggctccagtcaatgtccgctggctcgagttcgccgtgctgaagaacgacgtgtggcgcagtagtgactctggttcctcgtggaaactggtgactccaggatgcgcttaccctcaacgttctctggtgcacaaggccacacgcccggagctacagtgtgaagatgacgatcagtgcgagggcgacgcatcgtgtcaagtggatgaagctacggcgacgggattctgcgtctgcaatatgtggtcaccacgtgaattccacgctgtgacagtgttcgatgacgccttgtatctgtccggaggctacgcgctcgtcgagttggggaactgtggtgtcgaagaaaacgctcgaaagcgtccgtccggcgaggaattcgcatgcggtggcggctatcgatcctacctgaacgatatctggatgtccacggacggccagcactggaagatgctcacgcgtcatgccgagttctcgcctcgtggggagcactcgttggtggtcttcaagtcgctgctctacatcctcggtggacggaccggtgcctcgcaaaccaaggaggggactggagaagcggagacggagctactgaacgacgtgtgggtgagtgctacggggtctacgtggacccaagtgacggaggcggcaccttggacgccacgagcgaagcacgtgggactcgttctacctggtgcgcctgaccaaacttcaggcgacgatccggacgaccagctcatcttgatgtttggcgaggatgcagagcggacgctggaggacgtttgggtctggaagggaggggacaccgactggatcaaagactattcatcggacactgcgttcgctgaatatgtacgtccaaccagcgatgtgtcctatctccgaacgatggtggacgcggacgcagtggcactaggagtggctggggtcaacacgatcatggacctcaccagcctgtcgttcgaccaaacactcgctttacgacaactcatgcctgtgtgtgactacatcgccctggctgagctggtggtggagcaatgcactgtacagccaacagagtacgaaggagccgaatacgccaatgtgaaggtgattcaaggagccaacggcgacgcagaggcggcagcagctcaaactacgacaaccgaggatgagacgaactgggacggctgctctcatattggctcaaaggtgacggacgcaacaactggccgtctccgctgggctgacgtcctcggagtcgatcaggttcaagtccttcgtgacgtattcgtcgacgcccaggagagcatctgccagtggagacccaagccgcgctctggccatgccggcgccatcttccagcgccgtgtccttctccttggtggtctcacagctccagattactacgacaacgacgtctggtaccgcgatgcgcgtcgtccgcgcgctcagttcacgttggtgccctcgagtggcagctccgatacggtgttcaagttcgagagcgacaaaccgtactgcgtgttcgagtactatttactcgacacggtagagcagctcgtcgtacgcaactggaccctcactttaggcgaggtggacttcgaaagctggctggactcgggcaccttccgaatgcgcgttcgagcgcgagaccctgctggcaacgtggatgagacgtttgaggatggtcgcaatgagcacacttgggtttacgagcgcccgctgccttggggcctcatcataggtctctctagtgtaggttttgtcctgctcgcaggcttcttgatggagtggcgaaagcgccgcaaacgcgcagccatggagcgctacgccatgaagcgcatgcgccgcaagctaaagaagaagaacgcagccgtcgccatcgcaaaggagggcgacccgaattggcgcgagacgtacgacgacgccaaggacggcaagaagggcaagaaaggcaagaagaccgcggctaagaggaagcccacgacggccaaggacaagaaggacaagggcaagagcagcaaggccgcagccaaagccaaagggaaggacatggcgaaggaaaagaagggcaagaccaagtctgggccaaaggatgataagaagaagacaacgaagaaggaggcagtgaagaagactaccaagagcaagacggcggactccaaagctaaacccaagaccaaggacgctgcagccaagaagaagacgaaggatagcacgaagacggccgagaagcgagcgagcaaagcaggcgcaaaggacaagaagaaaccctcaagcgacaagaataagaaaactgacaagaagaagaccaagtaaaaaggcaactttaaagttgaagtcttttcggaccaaaacgtgaccacacagagaatgcttcctaagtacgattccaacaacttgttgccgtctgttcatactgaactcaagtcacactcctggccaccatgggcacctacgtggaggactacctcgagagcatgtacctgctgccgtcggagctcaagcgcaacttcgacctcatgcgggagctggacaaggttcgtgcgtgtgtgttctacatccctcgctcccgttctacccgttctaacccttcgttctccctccgcctccctgtgcagtcgtcctacccgctcctcgacgaacttaaggagagccaaaaagcgtacttaaccggtgcgcgacaaaaggtgctcgaaaggtgcgcagattcgacaaaaggtgagcccacggagcaggagctgcgcgagctcatcggggccgacgacgagatcgccaagctgcaggagaagcacgcgctggtggtgcagaagctggacgagaaggtggccatcgccgcgcagagctacgacatcgtggaccaccacatccgccgcctggaccgcgacctggagaactacgcgtcgctgctcaagaacagcggcgagtaccaggaggacagcaggccgcagcgcaagaagcagaaggtggcagcggcctcagtgacgcagttaggtcagcagagccacgtgacgccccatgtcaccagcgtccgcagcaagaacagcacgtccagcagcgttaaggacaagtcagggacgcccgcggtctccaaggcctcgggcggcggctccagctcctccaggaagcggtcggtggctgaggccgctgtggctgtgcctgttgctgcggcggggccggtgctgctggcctccgaggacctccccatcgacccgaacgaacctatttattgcagctgtcggcgcgtgtctttcgggcagatggtgggctgcgacaacgacgactgcaagtacgagtggtttcacttcggctgcgtcggactcacggaccagccacaaggaaaatggtactgccaagactgcaagtcgcagctcgggatcaagtgatcgagtcacattggaacaggcttggcgtcagttaccactcggtgcatattacgaagtccatttctttctgctgttgctatcattgttgctacatgtattgcaatacctatcacccatgacggcaagtaaaggtctacaaggtttgcaccttgaagaggaacatcttgcctattctgaggttcaatagttttgccatacgagccttcatctgcactgcaatgaaaaaaaatgcgtgttcacacctcatctgtcgacctacgacgctgttcatagctctcacacgtgcttgctctacagagcgagcggcttcacacacgctcaggtccagtgtagggattgcgccacccacactgcctcgcccgctgcgggcgaatctactttctactcaaaagacctccttccgacaggagctgctgggcgcctccgactttgagacggaattttcacgagcacgcgattgtttgcgccaatgctgtctctaagattcttgttgctgctgtaggtgtgctagttatatgaagaaaactgtatgcgaggccagattctagtgtagcttcccgctgtagtgctcgcttgccagcaatctgttagttttcgagctaagaatcaattcacttctccatttgcctcaaaagcaacaagccaacctcctctccaacccgacgactactctacaactgtcctactgcttcgcttcactcccctctccttccagctgcgctgtgcacgaactccaaatttcgtagcacttgctctcggtcccggagggattgtggaccacaccatcggacacaatcggaccgaattttgtgtggtgcacaccaagttaaagttgaagtcggggttgcgctttgccgtcgtgcccgcagagctgtgagaagcacgccccagtaaaggaagtaagcgttgtaccgtcgtgctcgcagacagagctgtgctgaagccctctgagcgtcaagtgaaaatggacgcgaacgtagctgcccaggtgttggcagaggtgaccacggtcctgcgcaaacagcaggagctgatggagaagattgagaaaagccacccgcggagcggcgggtggaaggcattagcatgccgcactatggcggctcgctcggcgaaagcttggagctgttcctggatcaagccaggctcttctttgaggctaagaacatcgactacacgcacgaagataaccgcaagcgtgtgctggccatcatggtttctaacctaacggggcaagctgctacctggtacatcacgcagcagcatgagattgccgacatcacggcgctcgcagcggcgttgcggcgcgagtttattccacccgtcttacaggagcgcttgcgcgactcgctggaccaactcaaacagcgtgagtgccgtgacctgactgagtacgtgactaagtatcgccagctgatcagccgcgtcaaggacatgggcaagctcgacaagattacgctctttacgcgtggccttgtgtcacagactcgctccgaggttgtgtatcgccggtgcagtacggtgcacgaagccgtaaacgtatgagcgtgcgcatcctacccagctttatggatctcgagggatttcccgatctgcctctcaacgagccaatgaccatcgcggatttggaggctttggccgcaacccgaatcgcgccccggctcgagagccccaacctgagcccatggacatagggtacgaccgagttatctcgagggatgagtgccagagacgcaatctatgcttcttttgcaaggatccagggcaccggatggctcagtgccggaagcgcagtggccagcgaggacctctttgccagccgcaacaccagcagtagagctaccagcgccagcgcgacgctcgcatgcctcgtggcgacggcgaaacaactgctacaccaagccaccgagtctatgcctacgaggaggaggagcccgacgcagagacagagttgtttgaagcgatgactatcaacgcagctgggatgagcagcgctgcccgccaggacgaagaccggatggcacatcggctgctagtcaagaagggcaaggtgaacggcacccctgtcaagattctgttggacagcggcgccgaccacaacgtgatgcgcgagggcctagctacgcaagtggtgcagcgcaagaaggctatcgcagagcttttcgacggttcggtcaccgacgcgcagtgggtcaacgaggtgaaagccgatattatgcttgaaggggggtattgtctcccggatatgttattctcggagtgggacctccccgctgcgcacgacgttattttgggtaagccgtggttctctcgcttcaatccgaccattaattggcgcacgcatgaggttattctcgattttgatctattggacccctggtggctaattgacgatgcggagcggttcttccagatggccgaggaagccgaggcggcgggccagacgacgtgtaacccggtcagcgtcaaggatgccctcgaggacgacgaagatgactggatcagcggtggcgcagtgtctggcaaggccaaggacattgcgccgctcggcaacgacaatggcagccaagggcgtctagatgagcaatggacatcgaccgcaattgatcgcttgctccacgactacgctgactgcttccccaaggaactgcccaatgagctaccagtatcgcgtgcggtggaatttgggctgaccatgaagcccgacgcgcgtcccagtccacgcgcaccatttcggctgtcgaagaccgagcacgacgcccttaaactgtttgtcgatgagttgctgcgcaaaaaatggatcgagacgtctgactcgccctggatatcgagcattttcgcggtgccaaagaaggatccggtcacgggcgaggctccttctaaggcagaatgggttcggacgggaaatgcgtcgctacccgtgcggtgggtcatggattaccggtatgtgaactctcaaacggaagtgcctaaaatccctctcccaagaattgaggagctgtccgaccgaatggtaggctgccgactcttcacgacgattgacttggcgcagggctaccaccagatgcgcgtcgagccctccagccgcaagtacacagcgttcaggacggagtcagagacgtactagtggtgcgtggccccccatgggcctcagcggaatgcctggcgtgtggtcgcgcctaatgcggatgctctttggcagttttgactttgtggtgttttatttggacgacttgtgcatttactcgcggacggaggcggagcatattgctcacttggccgctgtattcgaggttctgcgcgctcagtagctctacgctcggatgtcgaagtgcaggttcggctgcctgtctgtggacttcttgggtcacacagtgacggcggcaggactgcaggcggaccggcgcaagacccgtgccatcgaggagtggactactcctacgtctgcgaagacgttgcagagctgtctcgggttatgtggatattaccgccgctttattggtgggtttgcgcaaattatacttcctctcagtgaattgatcaagcaagacgcctcatggacgtggacggaccgtcagcacaaggcgtttctacacctgaaggctgcgctgcaaaaggccccggtgctcaagctacccgactactccatgcggttcctggtgaccacggacgtgtccggcttttgctgcggtgcggtgctcgctcaggagcatgatggtgtggaatatgccgtagcgttcctgtccaagaaactgtcccgtcacgagatcaattggcccgctcatgagaaggagttgtttgccatcaagctggcactgtcgaagtggcgtcattacctccatggtgtcaagtttgacgtcttcacagacaattccgcctgcaaatggttcctctcgcaccctaaagtctcaggcaagctcgctcgttggctggattttttcgggcaattttcatttgtactgtaccacgtcaagggatcaagcaacgtggtcgccgacgcgctgtcccgtgtggagagcgccaccgctatacgcagcgcttctattccagccacaccccagtcgaacctcgcagtgcattcgtgcgtggcgtcgtgcgtcggtcgggccaggcgtcttctggaacctgtcgaggacgtgctgctgctggaggaactttccctccgcgatttgagtcttattcgtggtctacgggggtgagagagcggttgcgcggtctatcggagtgccacaagccgtaactacgctcaaagcatctcaactatcgacggtaaccatcgaagtggacaagaaaaccaagcaacaatctctccgagcctatcgccaggacccactataccgcgatatgaccaagcgtcaagctcccgcattcagagacattgctggagtgggcaaagtgcgcatggaaaatggacttctctttctgcaccaatcggaggcgcgcgtgcatcgcctctgcgtgccggacgaccagccactgcgtacggacctcatcgcagaagcgcacgatggaccagccgcggcccatgcaggcattcggcgcacacagcagaagctagcgttgtggtatatttggccggggatggaaaacgacgtgaaggtctacgtgcagagctgcgcaacgtgcgtgcgctttaagtctagcagcctgcgcaagaacggccgattgatgccgcttccgattccagaggagtgctgggaaagcgtcgggatggacttcatcactgggctcccggtttcgcagggctatgacgctataatggttgttgtcgacctgctgaacaaacgagctaagtacgcacccacgcacactacggcaacggcggcggatactgcttgaattttctttgatgtcgtagtccgcaaccatggactgccctcggctattgtgagcgacagagacccgaaatttacgagtacgatgtggatggagctaatgaaggtgcttggcgtcaagctgcggatgaccacgtcgtacagggcccaagccgacggacaagtagagcggcagaatcgtgttctcgaagatgccctacgcggcatggtgtccttgcagggaactaattgggtcgaggtgcttgggacggtggagtatgcgcacgccacgctggtgagcgcttctacaaaactatcgccatttcagatcgacacggggcgggtggctcgttctccaattggtgctacccacagtcgcaacgactacgcacaaaacttcgctgaagaacgcaagcgactggttgcccaagctcaatagaacctgctcgatgctcaagaacggcagcggagcgcagtggaatttaaagctggagacatggtgtacttggctacaaaaaacctcccgctgacacatgctgcaactggaactgacatcgccaagtacaagcttgcgcccaagtttatcggtcccttccggattacaaagatgatcaacgcgaacgtcgcccggctgcaattaccccgaagcatggaccggctgcacgactgcttcaatgtggacgggctgcggcactacgttccgacaccggagcgattcgcggatcgcccgctcccaaaagtctcgccaacgcactttgctccgggaaacgaaggtgaagggctccacattccagaagccttgctccagcgccgtgtccgcaaccggcagcccgagtttctcgtcaaatggcagaatctcgacgagacggagaactcttgggagcgcgagcggtacatccgtcatgtcatgcactgggcttcactacttcgctcgttccgcgccgctcagcgcaacaagcttcgtgggaggatgcagggattgcgccacccacactgcctcgcccgctgcgggcgaatctactttctactcaaaagaccttcttccgacaggagctgccgggcgcctccgactttgagacggaatcttcacgagcacgcgattgtttgcaccaatgctgtctctaagattcttgttgctgctgttggtgtgctagttatatgaagaaaactgtatgcgaggccagattctagtgtagcttcccgctgtagtgctcgcttgccagcaatctgttagttttcgagctaagaatcaattcacttctccatttgcctcaaaagcaacaagccaacctcctctccaacctgacgactactctacaactgtcctactgcttcgcttcaactcccctctccttccagttgcgctgtgcacgaactccacatccagctctaaggttacttgcggaaccagccgaagaagccgccaccaccggactcgttgccacccgcggccgcagcctccgctgccttctcctcgtctgtcttggtgcgctccgtcaggtccgggaactcgagctcgttgaacgccacgtcgaacagcagcggtttgcacggcacggcgcggaactcgggcggcagcttcaccaactcgcgatggtccttgatcgagccggcctcaaacttgtcctgacggtccaccagcgcgctgatcgggcgtttcttgcgcttcttcgcgtccttcttgctcttcttaccatcctccacccctcggacgaggctttggtcagggagacggctttatcgatattcgcagttcgtaagaactgtcgttactacctgtttgatgtcagataccgtatcgccagaattattaacttgacttttgtattgaaataatatatattgtatgcattcgaatgacttactgttgtattgagtcgatttatctaagcatttgtatgcggattaactagtgttggacacataactcagggggttcccatgaggggacaaaaagcaaaggtataggccagaaggcctttagatggtggtataggccatgatgttcccgatccgagcgggccggctcgcttaatgccattttagaattgctgaacagtaaaacggacatgaactggatgctcacataagggcaagaaggagcagcaacctgcgcttgagtcttcaggtactcccatgattaatggccaaacttggccttaactttgtttttcactggctgtactatagaatgcggcgcgtcggacgtgctggtgctctagggggtgaatcatatgcaggcagtagccagataaggcacaactacgtgtgcagcacgaatgtgttcggccacaattgctgcggtatcgacaactccactaatagcgtctgatctttatgcttgtcagggcatgttcgaggccttcactgctggaatagatcaagacactgtatcacgatttcaaggacgccccaaaagacaaagtcacgctggaagggtctatcagcacgtgcgtaaaggcgcctgactgcaagaaaatctactcgctgcgaacctcgatcctgtgcaagcgcgtgaccgaactcaaagaacgcaatactatctcgctatgttctagtgttaatgtaagctctgagaagatattttattattgcgactggtgcgccgcaagtgaggcgcgcccaagtcgcttgtgatttttttgggggaaatccggtttggggtccgtaatttaaaactaattcggtttggggtccgttcatatcacaaggcgtattttttcgcgtaaaattgaaaacattccgtgttttgaaaaacatatacggctaatgcacgaaaattatatcgtgtaccctaaatgcaccctatttccgatatgcaccctatgtgcgaactatattgtacgacagccgtccacacaactgtcgtacagcaggcaatccttcttggaacctgcagaaccagttcgcctgaaacctcagccatcagagcaactacatggacaaacgaagaaggggggcaatgcgatgcgtacttacaaaagaagagtcggtggcaacagcaccgacgagggttgtttggacaggaacttgcgccggaggctagttcttttgttgtctctgcgagggggagattctaaactaagataaccctcagccgtccaatcctgcaaattagtaatagaaatagaaatagaaacgcagtgtcaaaaaaaaggatgaaaatcttcaccctgccgacaagggaggcgcgagtagatggagattcgcaggttttttttggacgaagaagagattgcgactcccgtggtgtctccgcccagctcaccaagcactctacgcatatgcagcacgccgctagcggcacaccagtgcaatatcaaaagccgaaagcaagatatggcaagtgagattagacgtctcagctaagtccgattctgtagggtacacttacacgttacgttttagtcatagggtacatacggggcacaagttacggaaaggtactgtgtacagtaaggccacagggtacgaataaggtacatttcataatcataagtacacatacccccttggaaattttcaaaacacggtaggttttcaattttacgccaaagattaagccttctgatttgaacggaccccaaaccgaattagcttcaaattacggaccccaacccggatttccccatttttcattcggaaaataaagaaagcttgttgccccacatggttgttggtgtgatgatcatttaactacatatcggttacgacaattgaatgcgcattgaatagctcgtcgagttcacttgtgtcacctcgcaagcttactgcgaggaagccatgctcacacaaacgttctaatctaaagtgtgcgaccagtgactccgataaagtcagcattaagtacaattcggatcaggactggtttcgaaagctctaatagaagttaggggaaatcctgtttcggggccgtatttttgaaataattctgtttcggggccgtaatgttcaattgaagcgtcattcatgaaacataccgtgttttgtaaaatatacataacgtatcctgtagccaaagtgtatcccactctgtcatgcatcgtgtttcccaactgtagcctgtagtctacgtgtagtatgtatccaaagtgtagtctagtgtaaccatgacgggggtattcgcagcacgcagagaacatggcgctgagttacttgaggcttcgctccatcaatagacgaatatcaacattggaagcctcattgacggtcctatcgggcccagttcctagtatcgcttggagacatccaaacaatagaactcagttgtgctacacaaaaatcatcagcaccttcgtccttcccttcacggaggaggctggcggtgtcatacacacgcttgttgtggtcgcggttgctaacagcggagctctctcgctctctctccgtcaggggcgttgtcgctcttttggctcggtaaaccatcgtacttagcataccctgctactggtactaccagtgtcacgtgctctggtagaagttgacgtgggtgagtctgcacttgttagaaagctggaaaaatgaagactgattgatgtttagagtggctacaagcctctagctgcagctaatttgaaaagcaaagagtaggaaagtatgaaaccaacgcgagctgcgaccgtgcaggtcagcgccgaggaaaaccccgtaacctccgaggccgttgggtcaggagctgctttgcgatccacgggattgtgcccgtgataaccagtaacttactggttatgtcacaacgattggtggtctttagtcgtcatattggaggccatgcaggaagtcaattgcggtggctaaggagatgcttgaatttgcggtggttgcctatgtcgtgcgggtacgtctccctttcagcagtacggtatcaacatgctctgtactgaatgctgaatagaaagcggatctgttgcttacctgtcgctacctgctacatgtacaaggtaatggattgcccacttccaaacgtgcgagagccataaaagcaactgaagaagcaccagaaagcttgcgagaatgctatcgaggtggtgttatatcatcgtaagcttgtctgaaactagataccgttatgattacactagattacactttggatacatactacacgtagactacaggctacagttgggaaacacgatgcatgacagagtgggatacactttggctacaggatacgttatgtatattttacaaaacacggtatgtttcatgaatgacgcttcaattgaacattacggccccgaaacagaattatttcaaaaatacggccccgaaacaggatttcccctagaaattaacaacgcaagacggatttatgtctacgcgccaaaaagcacttaccgagtggtgcacaagtgctgcgtggatttccggtcaggaaacatgtctgcacctggtcgagttaaagtttccgtcatgcattgttatcactagcatttttaccaagagaaggtccgacgaaacatccagatggaatatgtattgggtgtgcttagcaacaagtagaactttacagttcatccgtggcgaacttgcaacgggggtcatttttagattcacgtcttgatgatcaagttgatcgaatttcactcgaacaggcttttagaatatgcttacatcttcacagtcttctacgtagctttgtgaggaaagcgtgctaacgacaatttttagctttgaaaaagtattattgtatgaaccggctaaaacgcccaactctagcaaccccttattagatctcaatcgccaaattaatcagagtacaaatcagggtttaaatcgattgtgatccatatgcatcgcttggctgcacgattgcccactaaaagttgggcattcagctccaaacgcggctatatcgacttggcttccataaaacgatcgcctaatctgcacacccactcacatatgcatcgcaggacgcgatcgatttacaaatcgatcgagctaaatcagggtgctaatcaatcgatttatgagaaaaataggcagatgaagcgggtttcacaataatacaattaaccttaggtacttaggttgtaaggatgggtacatatagtcgcttactgcggcaagcactaaaaaaacgccacaactagggtagacgcaactaatacaccacaattaaccctttcgttcccccatacattcctattaatagctgtttatagtgaagccaagttaaacgcactaaaccggacctcatgtacgcttctactttatgtattatgcgagtgaaaacgactgttcagctcatataatataaattgtgacaatttcttaagctcaatcgtacatggggtattattttgcaagcagcaatctaattgagtgaaaggcgtcatccacgcagctgcaagcacgaaatttgcagtggcggcagtaccgtgagcaccgcgcctcttcagctaggagaaatgcagcgctcatttgctggtctcggtgcgacgctagggacccaagtgagcaagagagcgttacgtcgtccagcagcttcttctcggtggtgaacactatcaagggcaagttggtggaggtcatgaactcacagaagaggacgaagcctcacagacgtcgctcgagaactcgctgttcttcgtcgacgtgacgagaacgtttggctagctcaacgccgtggacagcagcgtacggggctcttggacctcagtcgatagtgcaagactcactaatgacacgatgtgggaaaggatttttatccgcacccatgtctgaccgctgggatgggacgacccttcgcctgactgtgactggtcggagtgaataggaatccagtgacgtggagtgtgacatgtggatagtggatgcgcatggtggatttggcgggacccggtgcttgcagtaagcatgggcccacaggatcggagatgtgcccaccggatgagcgctcatattcggtgtggagtaacacatcctgtccgtccgccgacttccctgaccgcaggataagcctaaggcgcgcaagtgcagccagtgaacgtatgctggctgctgcctgcattggctccgtcaagacatcggaccaacccccaagttcaccatgctcccatgcgcccaagacctcgctggacaaagtacactgtttgccggactggatcgtggtgcacccggtagcgatgcaccggatgccaaggttccgtatgaatgaggccggaccggatgatcaattcggtctgacccctggtgcccatactggatcgtgatcgcaccaacaacaagtccagtactgctgtgtgtgtagcagcaatccaggaccggatcgaccaagaacgtcaagcgacacaggatggctcacgtgatttgacgcagaggtccagtgcggatttgatgagacgccgtacccacgtacctctgtcgccagatgatgagtattgccgaaggaacgttgacgtcgacaagttgcccgataaccaagccaagtcaagcatacccaagctcagtgcaagaagatcgaagtcccgtgcacaaggtcgaagcatattcaagacaagtcaagtatagtgaaacctttattagaagtcagtgaagtgaaacagatagctagccaaacgtaagatcaaacagaaaccaatttgccgagaacacgcggacatctttcttcgggctgggaattccccctgacattgacgtcttcaagagcttatacgtgggatccgccttcgtgcgatcttaaaacggaggacgtttcaaggcctcactggtgttgcgagcactggtgtagtggggactcaaaggtaccaaggcaaagtcagcagggtctggggtgtcgcgccctggagtgatctgtgagagctttatttccgatttgcgtgctctatccgggcatccatttcatattccatcctgtgtgtcttaggcggtagaggtagtcacccccgagactgaattgatcgactactgtgtgataggattgacttatattttgtattgttccctcactctgtgagggtggtgcgcgtaagtgagtgtgcatccagggttgaccagtgccttgggtgacggctcgtaagttgactggcgtatagaccccccacccaagggtcttaaagaataagtggtggctgtatattttgtgacgtttagctcggcattgtatttctgtgtgttggttatactgaattgtggatctgactgtggtcccttcgattcggtctgactttctgttcattcggtgtagtttgtttcaggaacacacccagcagactcgattctgtattttcaacaactcactcggtgaagtccggtccgccaaaggtaaacgatacctataggggttgacacaaggacacacgccaagtccaagcgatcctcccggcccccggttcacatcctgtgctccgaggactaccggattgcagcggatatctctggtactccgaatgagttgttgaaaatacagaatcgagtctgctgggtgtgttcctgaaacaaactacaccgaatgaacagaaagtcagaccgaatcgaagggaccacagtcagacatagtgcgctatacacctggacgatcaaggcgttcacccgcctcgcctcactgacctctctgaacgtgggcggcggtctggttttgctccaggctgctcaactcggcggcgaacaagctgtgaaggcggtcaagatgcgcgtatgcactgactgacgctgggttggttgctaacaagtgtgacgcaggtatgctaagtgatttaggactaggatactgcaactgactacaataacgacagtcaatcgaaaataagggtgggtgaacttgtaggagggtggccagcggaggagatgacgcgaatctccacgcaatcattggcggcgcgctactgcaaggctccagaagcacggtagagcacatcttcaccccaataataccaggtggggcattcattcgcaccgcatcttacatgtacacaatctaacgtagacggtgctcacaatattcaggccatcaggaagtgcatggggccgtggtcgacgacgttatccaggtcaaatgctacagtacgtccgtgcgcatgcttgcgatgtccgagaagatattggtccaagaggtatgcaaggcgagatcgatggctataggcaggtgacacgttgctgctgcaggataaggcgatactggagaatttcgacgagttcgtgaaggtagcaagaatcaggaaatgggggcccatctgaagctaataggtgcgtatctgtggggctctgtcgacgaaattgatcctgcagaagcgatgataacgatcaactttgaccagctggacaaaacgagggctggttatcggaaatggtcttccacatgagatgacattcatgaacatgcaaactagtttaggcaacgagcacatttcacgaccttgctcataggtcgtcaaggatagacgcaagattggtcctaaagcgtgtaccacttctagtactaagaaggaagcaatagtactatcaatgccgccacacattagttgaaatcactcgatgctattattcaggaagtcacgttttactgatctacctgcaaattcaacgcgggtggttccactgtagatgatgtttgttcctggtctcgtctcgcttgcgccgaaatccgctgttgatctttccattgcttgataaaaacggcttgggctcgataaatcgaagagctccgcttgagatttccatctggggtgaagacattttgggggaggtagaactcgtgaaatttctgccagcacgtccaggtatcgttttggcacaagtgtggcttcaacttgtcggtcggatatgtgcgtttgcacaaggagacacggtgagcttctcaatagtccgtcttctgagtagctggacgacactcaaaccgacacactgtacactcccgcattgaccggcttcgacccttcaaaactatccatgcttccttcgccacacatggcgccggagtatctcgtgaagctgctgtagcatcctgcgaacacgctgcaggctcttgcaggttcggtgcagtcttgtcgtttgtgtatatcatacctttatcattttctaaccatcgcatccaactgccatcaaaaagctctcggaccagcgaaagcacgaagaaccgatgcggatctcggttgctagaagcggatgaatcaccaggatcgtcgtccgaaccatcgtcacaggtaggcgtttttccagccgcaagctcgtggcatatgtatgcattgcagcgcgctatgtctatcatagccattcccagcttcttgtgccaccttttaaaggtgtgcccatcggcaattgggaaccagcctcgcaattggttggcgcggtcaacgccttgcattttctcgttataattcttgccacaggcaggagcagggaagggcacttgctcctgttggatccgtcgatgcacagttgatacagcggaactatcagcgttggatacggcgttggcgaccgacccatctacccagctagctgccacgatgtgtttttcagtgcatacgccttgttccatatcacccctctccgtggtcttgtcagcggctatcatcgtaaacttggggaagtgcttactggtttgacgaaccgtcccgcgacagtagagtccaattgtccgcagggattccagcaacatacaagacgtgtaaaagttatcagtgttgaccatgcgccgtgatccctccagtgcagctgtcacttcgattacatgagatcgaatatccgttgattccgctgtcagttcggctacacgcgatatctctggcgtagacatcactccacccaaatgatcctccagttcgctcgcacaatgaagcttgaaactaagaactaaccacgtcgaagaacaacaacaggcataccgcttgaagtggtactttcctgtcggcttccgagggttatatacaatgatgtgccttgcgtagcgcgaacgacaagcgatgctggcttcgtcgacggctacatcgcgacccacaactacgtgaattgcacagcggcgtttcagtatgctgatgagcggtctaattcgtgctgctggatcgcgcttgatttcttcaatagtcactgctgctcgaaatgacaagtgcttgcgaatgtacaggaatcgtttccacggcataataatctccagactagttgatcgggcaccgggtaatactgatgattccccatcatctcgccagtagtttcgcatttcacttttttttgaaaagctgcataaacctcatcatctcagtcagtgtaatcgggtgacgtgatgcttcccctgcagctgatgcgtgactgttagtaaacgcgactacctgcttccagaatgaaagtggtaggaaggcgagaaaactcgacgtagtggagtggccaaataggggacgactctcctcacgaagtttggttgtagttgacccatcgggatgggtaaacagcccgggtggctcggaaagcgtttcggtcgtggaaaaagtcatcacttcgattgcttctacttcggcagggcaaaacggtatttgcagctcggtatggcttcgaaaagcatacaattctttgtagcccttgtcagtcatttcttcgaactcttccgtcaaagcaggtatgttggacaagcggggggccacattacatagagaactccatgaatcaccaaactccgcattgtttctctgcagactaacatactgcttgatccctttgaaagccgtggcttctggaatctggtgaacatgttttttcttggcttgaaacgcggtgttggtccaccgaacttcaaactggggaaccggtaccttgacaccatcagcgattttttcgtgtttcatctcatatcttgttattatgccgacgagaaaagccgcacctacctcgcgataggttttgcgaagcatccagtcttcatcagccggtgcgaaagcaacgttcgccctcacaattttgtcagcagacatttgagctcgcagtagcaactcctgtttgaaggctgcttcagccgtcttcttggatgcctttttggttgtagcgacttttgattttttggcagcagagcgcttggggggattcgatgcagcctttcgcttcaatgctccacctcccgtatccgatgatacttttcgcgcactcttcgctgatcgctgcctcgctagcacttccctttcacgctgatcaccttgggtacgcaaacccgcgtttacgcaagccacatcatcactatccgactggataggtggaagcctctcgccagtgtgcgttgtcaacgttgccactataccatgacgaacctcttcgtgggatggggaatagagtactgacggtggcctcgacgtggagatcgtggtttcgtagcaggcattactacaataacattgatctccaaaatccgcaatggcctcaccgtcagcggtgcgaagcgcaagtgacgatgccacatcgtgagagcagaaatgatgcatgaatgcgttgcatgcatcacaacttcggtcagtcgaacacccagtgctgcaatcagcacaaatcgccacttcaacatttgtttcacgtgtttcaaactcgttgctactggtacccatcgcatcggaagcttccacctgcctctttcctgcagggcaaccacttgaagccgtcgacccctcttccgcgtcagacgaattccaataccccattgctccaccaggactagacccattcatttcagaacttctgtcgccatccataggttcatctatcgtgatgttaccagagtcgatctcgccaccagccacaatcatattgtagtgttccaccagagccacttcacccagaacgtaatcgtcgccctcgaccccgtccggatttctaccaggacgaacatagcgatagcgattatccagattccctcggccacgtggcggtcgtgacgtccaccaagcgcgacgaagagccttccaggcttcggcaaagactgtgcgaccaccagacactgtacaacatattaggttttggttcatctaggtggtcaactcaaacatcacctgaagtagcggctagtggtcttagcgcaatagctcgccgagggttccgcgatacaggcggggagctcattgcgctagcgagagatccccttttgttgtctatacagaggtagattcttgggaagacccaagggcaaagatcttgtgaacggtcgcgacgcgcctccgatgaccaacgacagccgcacaaaatcaagatcataatcgggagaggttaggaaagcgctcatttcccaacccaccaggaagccggatggtcgatcgccggcatgatgcaatcgatgtaagtgctagccactttctaagctgattcgatctaatacttggtcaccctgaacaatgcatgatagctcccaggtcccactcgaacaacagcatctaatggcagagcattgtatgggaaaccccgtgacgtaagtggatgatcattattccacccacgacctggcgcggttttctagccactagcatactttatttgtggggagcccgtgctgtttgacaggattttttctgtgttcgttccagcgtctaaccgcgtacgcattcaaattcaaatgacagcaaacgaaatttgggactgaccactaacctataacgatgtaggtgtttgagacgaagtacaactcaactgaggacgtcgacgagttgattgtggctcttccggtgaaagacatggacaagctacacaaagatatcagcacggccaaaagtgagagcgctcacaactatctgtggatgctgagatggctgcagacctgcttggagttgtcggaggtaagtcccaacaatattctaagtggaggttacccgttctgacgctactgttatgtgctttctaaagatcacccgatcgatgattcaggatcggattcgttatttgcgggctcagatttccgatgctcgagaagctttggaccggcacatcgaaatccatattacgatggatcagaacaagacgtgcgatcccgacacgctgtggaagcatacacggcaaggcttcaagcgagagcagcagttcaacgcagcccaagatctactggaggccatggatgtggtcgacatcctggctcacgaccttatgatcggacatggaacgcaactttgcccctgcgacgactgcaacatctattaccgtagtcaagaatggcgccgcgaacaaccattccactcaccgatggaactacctcgaacgcagtactactgccgatgccagggtttgcgtccaggctgctcaccgacttcgatggcctaagcttgcttgacctcgcacttccacgagtgttctagcgagacactcacctgtacgtagcccggaccctcaccggatgaacgttagcgaactgctttgaaatacatatcctacttcttacattagtttcgcatccgtttggttttcggctgcggcaacccgttctactcgtgtcggtcaagtcacgaatctaccgactagtaaatatgatatttgtaatcagccggtcaaacgaacaccagacaaccacagctcattgttggccagtcataccacacgccggtcgggacacctagaagtaattgtagcgaaaacttaagttattaacacgagttacgccacgggaaagaagggcagccctcaactcgtccattgcgctcccttccatgctcacccgatgaggccacaacctaacgcattcctcgcggaaccatctacgtgacattgctatcagaattctgaaagtgaatcttggtgtcagtttgttcttttctcccagggatacagcctcattctcatcaactaacatcagtagcaacactatccaggctactatctggcgtgtcgtttgaccggcagatcgcgcggaccgccgcgtgttctatctaagcgttgctggattacaagtgctttggtacccccagctgaaaagtggatgcaaagcaacccagcgatcaatgtgtacgaatccatttacgacaactattagaacctgccatgcgcggaatagtgggccagaatccgtgcttgggttgcttccaacatctactacgcagttgtctgtaagtattcgccagtacggacatggtgaagcagatggatgtacgccgatttgaaatagcgtcaatccaggagctcgccgacactgcgatttcgtactacccttgccagaccaaagctcatgctctcccagcgtccagcccgcgatcgagggcactgtccgtgtcgaatcgggtcaggagcacgtcgctgacatcatggcgctcgtggacgaatcaaacctgacggccttgtcaccaggggttgactcacagcttgcctttgcacggtgatgtagcccgcttagcacgaccccggatgctgggttggggtggggacgcgtccaatcagcaccatcatcccttccttgtacgagcattgctatggcgacatcgcggcgcagtttcctcgtgagcatcacggtccaggtcatcgaatcgataaagatccgtccggcgtatcgtcacgcagtccgggcttggcatggagattgtgcatattcagggccttgacgaaggccattcaaggccagcgtactcgggggcggggactcggtcaaacgtgttgagtgttaagtggctaacgcgttgacgagagcctccacagcccagaccgtcgaaaacagcgcgagtgcgacgtccgttgatgtaggtccagtgcgccgacgagggacacgctagtccagcgtgttgggaggaggagggggcgggggataccttcgccgacgcgggagcagcacgaccgtggcatgacagcgtaacggatcccgccactcgacgagggacagcgtatggggatgcggggcggtcttgtcagaacgtagtctatggcggagcagcacgagtgtaccatgccggcttcggcaatccagcgaggcgctgaacatcgagcataccggggagcaggacgaccttcgtacgacggcgtttacaagctcgttggcgatggtgccactcctccaaaaggcagcacaagcccaacatggtgcatggcgaggtgaggcgagccgttcgggcttgacatgttgacgttgcgggtcagaggcacgagcagcgagtcgcttggaagagcttgggtggtccttggaaaaatcggaaatgagcttttagctggatcgcgtcacgagtttggcgcgccatcggcggcgagtttcgcgcgccaccgaccgaggacccaatcacacgccatgattttccggaagaggtgctgattggcggaatttgatagcccgcagtcatgattggctgatagcaaatccaggccgcgtgcgcaaatttgaataggatcgcgcgcgtgaatacgctccaacttcaactcgaaattagatgtggcaagattaccacatggagtcgtgctcgggaatttattcgcggcgagataacaacagatccaaacccctgtttattacatttcatgaaaaaacaattgcttgaattctaaggccttttatcgccgtaggtacaatgtgtagtttccaagaaatgcaagatcctcacgtcgtccaggaggcccatttgcaccattcatcggcgtgatgctcgacggccagacgcgcgcagaaatggggtggcagcaactatgatcgaggttggcgcggtgccacgggtaagtgcaagtctggtcaattggcaagattagtgcatgaataagtagaaattgtcgcttcggcgcacgacccgtggtcaccatcgaatggtttcgacagccaatcgtccagattaggacatcaaccttttgcaccgtggcaaccttgaggatagccgcggtcacaccagcaatcgcgttatgcgcaggtctggccgtcgagtaggaatttgatggtgacaacgggccgtgagcccaaccgacactttctacatatccatgcactaatcttgccaattgaccagacttccgcttgccaggccttaccattggcgccgtggcaatatcgatcataacggctgccccgccagcccgcgttatgcgcaggtccgcgtggatccgggaagtcaattacagcggcaactttcgccctggatcttgcccgaacgactgattggtccttcacgtggattcatctagtccgcaaacaacccccattgtatgttcgcttggaaagaagcaccaagaagagcaagggaaatatgatagacaaagaaggcttgcgtcagatcctggatgaagttgaagacacgaagaagcacttcgtgattctcgatggagtgacggacgataatggtgcggaagggaaaacctgttttgaatggttaagggcggattgggctaatcgccgactcgtgatggtcacgtcaatggattcacgcaggaaagtgaacctggatgacgatgaaacttttaaggtgaaagaacacgttgtgccgtcgtggacattgagtgagtatctcgacgccgtgaacgatgacgagctgtttgaatctgtcagaagtgatttggacgcatcagacgaagaagaccctacacgtcaggaactggtggaggcgaaatactacttcgccggtggaagtgctcggtatatgttcggttgctcgacagcaaccgtcatgacatcactggatgacgccgtctctgcggtgagcaataacacgcctggtgcgattggttaagtcaaaacacactcaaccggcgttatcaatcgtcttttcggcaaatatggagacggtcgtgggattatcagccgctatgctgcttctgctctagcgcttgctggtggctcggagttgatcaaaagattcgcttccttcttaacacgatgctcgaacactgcgacggacggggtgattttggaaatgtacgtctttgcgtgtattcgggagggtcggttcaggctcaaaacttggttgcaggagggtaagcttgttttcgaagctgacacggcgactaagtttccgaaaagcgtggttcttgtcgtggaccccaagaagctaccgctgttaccgaagctatgctggctgaaaccgaaaaagtacaatcaagggggatacgatgccgtgtacatcaacaaggagtatcaactagttcggtttgtccaagtggccaaaagcgacaagcagagtttcttcattcactatttcaaggagtttctcgactcacttaagcaacgagaaatgcctcacgtcagtttagtggagattttcgtcgtcgttgataaacaaaagatagccaaattcaagttttccaaagtggtgggcgaaggtggtttggcagacttcgggtggagaattggtgaggagacggagaacgtgaagcgtgctgttctgaaaggtgtcggcagctgggatgcgatccgatggtgagctcgcgtctacccgggattttcgagttgagtttacgagacatgcatggctgtttaattcagagagctgctttctcgtgtcgttcagacaatgcagcctgctctccgagtctgtgctttatgttggtaaatgaattcggcaaacgtgacaacgcttacgcgtaggggttaaggattaacgagtttgtgccggtactgattggggttggagcaatgaatgtttttttcttcttttcaattcttactcagtgaagtgtactactccgtaaatttgaagtagtacacatgtagtagaagaccgtgaccactcagtagaggctctacaagtgccatgaacttgtaccttcccgacgtgaaagagaagaggaacatcctaatgttctaaagtgttttactcttgccgtgcgggtatgaaaaaaaagcgcgttcacacctcttttgtcgacctacgacgctgttcatacctctcacatgtgctgctctgcagaaccagcgccttcccactagatcaattccagctctaaggttacttgcggaaccagccgaagaagccgccaccaccggactcgttgccacctgccgcagcagcctccgcggccttctcctcgtctgtcttggtgcgctccgtcaggtccgggaactcgagctcgttgaacgccacgtcgaacagcagcggcttgcacggcacggcgcggaactcgggcggcagcttcaccaactcgcgatggccctcgatcgagccggcctcaaacttgtcctgacggtccaccagcgcgctgatctggcgtttcttgcgcttcttcgcgtccttcttgctcttcttaccatcctcagtcgccaatgagagctgctccagctcgatacgcatggcatcggcccgcgttgaggattcgaggaagctctgcgccgtcgtacgactcaaagcacccgcgagctcttcatgcagctcacgcgtgaactcctgcagcaagtcgtccttggccgcaggctgcgcggccagaatctcctctgcttcggtgaggaaggtcgacgcgtactggtacagacccaacgcctcggcaaacttgttctgaaggagataggtctgcgcaacggtggacgcacggcacgcgcggaacacagcatgataggcgctgtactgggcggcacggcgctgctcctgttcacgaagcccagggatggacagaatgtcgcccacagtctgcacgagcatgtctagaatatgcgtgagctcgccggcctgctgcgccgagaagcgctgcttgagcgtgtggtacactgcagcctggcgctccacctgcttggtcagcttcctgaagcgcgtgtactcctccagtgcagccagcagctccaagtcagagtgcaccagcgcactgccgctcttcgcctgctgctccagcttcagcgtcgcgttcttcaaagcctgcagaagagcgtcgtacgcactcagcagctccaggaagcgcgcttcacgggccttatcatcgcgcgcagcctccagcttggcagcaagctcatcagtgcgaaccaccgccatacccagctcctgcgtgggcaccgttagctgctgctgcttccactccacggatccgaggtttgccaccttctgcttgcgcgcctcaagcaacaccaagtcgatcttggactgcagcagcgcattgttcgcgccatctccgctcgactggagctccaacgacgacgtctccgccgagctggccgagcgtccctgcagcgccaacctgtgctcgcagaagcggatgaacggctgcagctcgtcggccgagcgcgagaacagctccttctgcgaggacgtgcccacctgcgacaggtccgagtagatgcggcgcgccgtgttgaacttctcaagcgccgccacgtgctcctcgcggtggaaggccaggttgccggccatgtacgcggcgtacgcctccgcctcgagactcgtgcgcgcgtccgcgcggacggcgcagatctcggccaggcgctggctccagtccgcggccttgcgcaggcggccgttcaggtggaacttgatgcgcgagttggcgtcgtcgccgttctccgacttgtccaggttgtcgtcctccttgagctgcatggcgtagccccacgcgcgctcggcattgtacagcggcaggtacagcaggcggttctcggtggccgactcggcgtccaccttcttgttcacgaactgcttgcccttgccgtgcgtgaacttgaccgacttgcggatgcgccgcagccggcgcgtgcagtactggcggtagcgctggaagtcgcggtggcgcaggccgttctgcagctgcgcggccttgacggtctccaggactgcatcatacaagcaggtggacacgcgcgcgcgtcagtacaaagcaccagtcagacaatggggtggtcaggtacgtactggggacgctcagcacctcggcgctcgcggcgggcgcgtcctccgccttcgctcccttggccatcgtctcgctgctacaagctcgggatcaatgtttccccctctctgtatggagcgcgcgtcccatttgcaccacaccatatgtacatatagttggtgtaaggtttgtgtattgtagcttttcgagcgagtctgttggccgccattagccaggaagagatgcagaactgctactacccgctgcctgcgcagcccaagctgcccgtcccggcggacgacgatgcgcccatggagcggctggacaagacgcgcggcagctccgacgagatgcgccgccccttcatgcagcttggggctgtgagcggcgctgccggctcggcgtacgtggagatgggacgtacgcgcgtggtgtgcgcggtctacggcccgcggacggacacgcgcgcgcgccgcgagttcagcaaggacgggcagttggtgtgcgacgtcaagtacgcgccgttcgccgacaagctgacgcgccgcgagcgcggccaggacccggacgagatggagctgtcggccattgtggaggaggcgctggcccccgctgtgatgctgcacaagctgcccaagtgcatcgtttcggtgttcgtgacggtgctggaggacgaaggaggcgtgttcgctgcggccatcaactgcgcgtccttggcgcttgcggacgctgctgtggagatgtacgacgtcgtcacggcgtccagcgcggtgagttgctgctgcaatgctgaggtaggggctatttgttagactgacacgggcttcgttgacttttgcgccagggtattgtgaacggctcggtagtgctggacccgagtagagaggaggagcagcgcggcgacgggaagctggcgctggcgtacatgccgtcgatggggcgggtcacatacatgctgcaggctggccagatccaccacacgcagctgcaggaggccgtggatctctgcacggacgcgtgcacaggagttatgcggacgctgctcactgcgtcgctcgtaaaggctctgtcttaagcttttagataggaaaagcaatatacattccatcgcaccgtagacgatgaatagacttacgtgatgtattgtttttctcttgggcaggccgattgcgagcagcatcgtcttcgcggtatctagtgctggtaacagcacgttaagtctaggcgaccacctgcgccttgcggttcttcagcaggttcttcatgaagaactcgccggccttgtaactggaacgcaccatcggtccacttgccacgtacaggaagcccatctgttcggccaccttctgccactccgcgaacgcctcgggcgtcacgtacgacttgacgggcatgtgcttggagctgggacgcaggtactggccgaaggtcacaacgtccacgccgctgttgcgcaggtcgcgcagcgtctggaacacatcctcgttacgctcgcccacgcccagcatcagcgacgtcttggtcacaaggtgcggcgcagccaccttggcccgctccagcacgtgcagcgactgcttgtagttggcgcggtagtcacgcacgcgacgctgcagtcgctccaccgtctccaagttgtgtgcaaacacgtcgaggcccgagactgccacctggtcaatcaggttgtcgtggccctggaagtcgggggtcaggcactcgatcaggatctccggcagcttggcgcgcagcgtgctgacggtcttggcgaagtggccggcgcccaggtcctcgtagtcgtcgcggtcgacgctggtaaagacaatgtagtcgagtccccaggcggcgatggcctctgccaccttgttgggctcctcggggtcgagcggcgccggcttcttgctcgtcttgacggcgcagaagctgcagccgcgcgtgcacgtgtcgcccatgagcatgatggtggccgtggcgatgccatctttgccgccgccccagcactcgccgatgttggggcacttggcctcctcgcacacggtgctgagccccaggctcttgacggtcttgcgcaggcgctcgtagttggcgccctgcgtgggctgcgccttgagccacttgggcttgcggttggacgcgttgggcttgcgcgagggcttggcgccgggcgccgtctcgggctcgaacgcgaagtcctcgagcgacagcgcctgctccgcgaaggtcgggccctgacgcgattcctcggccaggcgctcgcgcagcgccgcgaggcgcgagccgcgctccgagtgcgtcacttgcacggaggcggcggcggtgctgctgaggcgacgcgcgtgctgcgcggccacgcggctgcagcgggtcagcgtcgaggcgtgcatggcaggaaggagagagcttggcgctagcgtgtctattccggagtgccgccgcctggaagcatacccatcaaataggatgattctactggttgaaatgccgtaaagtaatctggtgattggatgaaatgggaattggtggtgcgattggatgcagcgcccaatatcgactgggcaccgcaggtttgtgtcatcgacaagcaccatgatccgaggcgcggcgcgagggctgttccagagcgcgcggcaagtgcgacgagcggctgcaaagcaggccaacaagcagcagaagagcacgcggacgtctgccggtcgcactggcggcacgcggcgaacagcgtgcgaggagagcgtcatcaccaaccagcagaggcaggcgttcggccgcgcacgatacgcggaggcggtgagcggctgcaacgaaaagatggtttgaggagcgattgctgcggagactgacgtttgtggttgtgcgcttagatgccgaggattttgtctgtgggcgccgtggggatgctggacgtcggcgccattgatgcactcaacgtgctgatgcaagacctggctgaagacgacgatgacggacgataacggcgcttcgcagcgcgtctaagtagcaggagaacatcagcgtaatacagctttgatttgtgtagattgcaccacgtagtcttcaacagcccagtgcatgtagacgaacgaagcaatgttttagccagagatgagtggtattcaaagaattactcgcctggccttggaaggcgtcttgctcatgaataaactacctagcgggaggtagccctctcctctttcaaggagaaaagcccacactcaaccgctaacttactccagcaccgggaactcgaacacaacgtccttgttggtcagcttcttgtacacggtggcgaaggtgtccagcttggtctcgacgttgacctggtccttggggtccagctgcaccttaagcagcttggagccgtcaagacggcagcgcgtgcgcttgccgacaatctccgtggggaacacgaggtcctgtaggaagtaaatgacacaacacaaacagtccgggaccgtgagtatacggcatggggtggctattacccagaggccatcatcgaatttctccaggttgcaaagggacacaaacaccacagaggctggcaggggcaacgtacgtcgaggatctgctcctgcacgtgggtgagcgtgcgcgagcgagggcgggggccggcgccgtggttggcgcgcgagtagcccttgcccaggatggtgcgctgggcgatgatcacgacgtggcggcccgagaacttcttctccagctcgcgcacgaggcgggcctggatcttcttgaacgaggcgtgcaggcggaacggcacgaagatcacgatggccttgcggcccgaggagatgtccacctgcttggcggcggtgatgtacaggtccttgaggtcgttcttgatctcggcagcggactgctcgaggttcacgagctcctgagccacctgcagctcgaactcatcggcggtctggccctcgggcttgacgatcttggaagccatggtaaaaagtagtcggggtctttgagcaaaacggcgagtgccctgacgtaggtatgtgaaggagggaggcgagggactgctggccagtcgattgcgataggactcagatctgaggaacacgagtttgcgccaatggggggataggaggtacagtgtaccaactttgacaatgcagcgacaggacgttgaagcgggcagtttgaacacgtcaagcacgatggtggcgacttggggcagccaatcggaaccttgaccatgatcatactgctgccaatgccatgggttatacagctagcgattcgggattcatcgtgtcaagtactaccattctttgacacatctcgcgctgacgaaccagtgaagctcagcaaaggacgcatcgacgtctattatgaacggcacgaccacttcactacacctatttgacaactacttaagtacttggcactgagaccctcaccatgcgcactgttagactagaatgccctagagaggatcgcgcggccaccgtttcctgctcgtgccgacatggtaggcgcgctgctcacgatagcaccaggccgacccagcactaccgaggctggaacaggtccagcccaggcccccatgagagacacccctttcacaggcactgcgttgttgatatgataagtgttcttggtgggagtggagctcttgttctgcaccttgttcttcgggagggtgtccttggtcacctttaccggtgttggaggcggtgcctgtgtcttcttggcggcctggatctggccttgggtggcgtgctttgcaggctgctccttccgtcgttcggcctccttctgcgacttcacactcttctccgtagagtttgaccgagggcgggcgttcttcgcctgcagagcaggtttgtccttgctggcatcccaggcgccgccgatctgcttcagctgcgtacgaatagcgtcgtacaggtgctggccgccgagctgcagcatggcctcttggaacttgtcggactgggcttgcttcaccatgtgcttcagcttgtactggttcaccttgctccaatccgctgggttcgtcttgccgaagattggcttcaacgccttagtggtcggtgccagcattaaccgcccattgttgtcgaggctcaggatctcacgcagagtctggcaggcggctcgcttctcaggtgccaagcccagcaccaaccgcagcacgaagctagcacccaccgagtgctgcgtttgctgcttcgactgctgcgctttcgaagcgatagtggcactgcccatattcctacggaccaactccagctcgccgtacttgctgagggcagccgacacagtgatcagcgacagcagtgtctgctgggtctcctgtgtgtcctggacgcaagcgagagtctttgggctcaagacactgcgcacccactgatcgacgttctcacgtttagacttggccttgctgttgatgagcttggccaccgcctcgtccttggcggtgaagtagctgaggaacttcacgaaccgttcgtggtcagcctttcggatctggcgggctcgctgcacgctccacgtagtcacgtcgctcaacgcgaacggcttggactgggaggcgggagtcggcgtggcagctaccatcgcggtcatcttcgtcaccttgactgccgtagcgctagcggacttggcgggggcagcggctgtggcagccttggcgttcttggcctgctgtcgcgatgcggcgttggtcattgttggggtgctcggggagcgcgaggctctcggggcttgagttgttgttgctagttggcttgctggtcgattgcaaagtgaggaactcatcggcatcactccacgataactgagcgttgttcgccagctcggcctacatggcgacgataagacgcctaggatacctggagcttcggcagtagtcgagcccaaacaattttgctcagtcggctaagacaccgaagcagggtatgtgttggatagtatcttcagaaacacacatatccatgaggatacgataaaccaaaatgatcagatgaactaggtgtgacagtagacgctgcacgcctgcgagccaaggcagccaatgaaacgcgaacacggattgtcgattaactggctcaggttcgcttttggcacacgttgctgccttggtgagtatatttctgactatcagcaagaaaccaccccccaggaagaacgcaaaccgaagcaccgctccgccattttggccaagctgctgtcgcttccggagcacgccttcgccactatcctcgagtacgccctcgacggcttcaggcaggaggtggttgggcctgagggacaccatctccctcttttggtcttgaagcccattgcattgctctccaaacattcaaatgagttggtcaacagcatcatcaagcggataaaagatggtgtgtcctgcgtcgaactggaagacaacgggatgatagacgacgagtgcatggtcgagatcattgacgaagcccgggaatacggagctactgttcgggacttccgacttcgcctgggggattacgaccagtccagcttgtcgccgagtccagggcctggagagctggacgacgtgaacatcgactgggacagactcttcggatatatgccatggatcaagaggctggacttgaccaaggtgccgctgttgagccgccatttgccacggattctcgtggctgcgtccaatagatgccgacatatggagtatttgatccttccaggcaagagcgactacgactccacggtgaaaggtcctgagatcgagaatgtcatgacaacgttggttaaagctctggagacgtggtatgtgaacggcacttgtagaggtttgaagcagctcacggtaccggcccgaactgaagaagatcacttccgtgctagtgctcagtacattcaagccgtggtgcaattctgcccgaacatcgagtacctcgatgggtataagaagtgtctgttctacggatctacatactgtgacgaaagttggctgctcacctttgaggcgtgggaggccttcaacgcctcttgtacagctctgcgggagtttaactggtgtgttgtgccattcgcggatcggtatttcgaaatcttcggaaaccacgtcaaaccgaagctgaaatcgctgtcgctttcggcgaacgcgagcttccactacttctacttcttcgacaactaccccggagtagccggtttcccggagcccgatttccttgacgaacgaacgggctatggttgtcgagctacggacgccagtaccgtgctaagagcatgtccatccctgaccgagttgcacatcgagatcgatttctgcatcaacaatgagagaccagacccatacgttaacacggacgtgtatggagacgcgttttgggaagctgcagcaacgcactgctcattgctagaaacaatcatggtgtcggacgtggcagggcgtgagtatgtcaaagttcggcccttcgagacgcagacggaccgcacactcctgatcctggcaggactaaagcgattgtcaaagtgccacctacctccagctcggttgactggcagtggcatcttcgcctatctgcgccgtgtatccgagatggaaggattggtcggccaggaacgccacctcaccattgcaattggaggtcgacagcgcgaaaaggtcgcgagcttctacaaagtgatcgtgaacctactgaaactcctctcggagacgagagaggaagatctggacgcggcactttgccgaacgaagacgaagctgcatattgaaaatccgtactaccggaaggccgacagcagttggtgtgaggagtacatgcgcgacaagttgctgccgcttttgcagtctgtcaggaagaaacacacatcgctaacgttacaagtgcacattcaggggcgcaacggcgacagatttgatcgtatcacgggattcattcttgactggcgcccgcgtttccgtggacgtccgttttttctcgacatctccgacgaaccgttttgaagctaccaactcctgacaaacagttgaaagggatagcttagcgtcagtgcgctgagttaatcacgacgtcaaattccatggtgatgtcgctggctaacccgttagcttgaaagactttctagcgatgctgtaatgtagccagtctccggacgaattcaaccgcattgcagagtttccttacgcgacgggccttgacgtcaattccgacgtggttggattgacaagccaggcttgtgccgccattttctttcgtgttgaagctgtcttgatatggttgacgcgtccgtttccagtcaccgaatctccaactcgtctcatggacaaaactgaagttcccatcagacgtgaagccatcaagccgaaaaacacgagttgccctggcgtggagcacggcgtttggagatttgcttgcgttcttcgtgacgcccacccgataatcctcgcttcgacaacaacttcaacgtgaaaccctgacgggcgcggcaggtcgtggcttcttcgcgctccctgctgttgttaagcccagtggcttcaacacgagggtagcttagctagatacgcaatgtcgaagtcgaagttggagtcgaggcacagctccccaagaacctcactgcaacttttgctctctcaagcgcagttaccagcacccgacaatggttttccgtcgtcaagtcctgcgagttgctctggtcaccgactgcaggtttctgcgacgcacgctgcacacaaccgaaatggacaagcctcgaccgctgtggcagaagcggtggccaacgctctcgaaggtgagctacgcgagtgaaggcaagcgaattgccgttactactacagtggagcggcagcaagcggtgcagagcgacaactaccaactcgtgatcgtcggcactggctgggccggctaccaaatgttcacggagtgctccaagtatctctcagacattgagaagaacttgggcggcagggacgtcgacatcgtcgtggtctccatgcgaaacgtaagtcaagtaacaaagtagaatcgaattgtggtaggcactcacccattgtgtgtgctgttgttgttgttgttgtagcacttcctgtacacgcctctgctagcgagtacaaccgtggggacgctggaattccagtccattacggagccaatccgcgacggcatgttccggcacgaaggccacttccacctggcaagcgtcaaggagatcgaccccgagaagaaggagctgttcgtcaagtcggcgctgggctctcgtcgcgagtaccctatcaagtatgacacgttggtgttggcgtgtggctcccgaccgctgactttcggcctaccaggcgttgaagagcacgcgttcttcctcaaggagatccaccacgcccagaagatccgcaaccgcatcctcgagaacttcgaggtggccactcaaccgggcgtcactcccgaggagagggagaggctgctgcatttcgtagtggtgggtgggggccccacaggtatagagttctgtgccgagctctacgatttggtgctccaagacctccgacacatgtacccggacgtgtccaagtacctgggcgtgactctgttggactctggtgaaatcctcagcgggttcgacaagcagctacgcactgtggctctcagcaagatcgagtcgcgcagtagtatgcggatcatcaagaagaactgcatcgaggtcacggctgacggtgtgacgctcgaagggggcgaaaagctgcctgcgggtctcgtcgtctggactgcgggagtgggtcccaacgcgctcaccaagtcgctcacggtcttcgagaagagcaggcgcggcaacatcctgaccaaccagtactgccaggtacttggcgccgctgaggtggagacggaagctccgttaggaatgccgcgtcgctcgaacgtcttctctattggagactgcgctgagatcctggattacccgctaccagcgacggcgcaaaaggcccaaacgcaggccgactacctcacggcgctactccgtggcaagaatgcggccccggccaagccgtacacgttccggagcaaggggatggtggcgtatctgggctcgtaccaaggactgttcgaagcgcgaccgagagaggacaacaagatcacgctcactggatggcaggcgtggttcctgtggcgcagcgcgtacctgacgaagctggggagttggcggctccggttgcaggtgccgctcgactggctgaaagcgattcttgtgggccgagacgtttctaggttttaagacacgtgagagctgtggtggcaatggaagtttaactctttcatgcggatcgcgtttcatgtccaatccaattctggccggtcacgatagcatcagcgtcttcaagacgtctgattctcctaaacaagggtcttggggggggggggggcttagacgctcgcgtatccatgttagttcgatgctgagctgtagttaaatcaagctaagcttaatgctacaagccttcagttgacggcaaatggttgaacttgaagtggcgtcaaatgcttgattcgtcgttgcctctgggctccattcatacgcgaggtgttcgaagtgacccactgacccagagcacgtaatgaatgaaatggttcgtgcttgcggctgttgtgcagccggagccagagctgagccaagttgggttcacgacgacaagtgaatgtaacaggcatctcaggagtgatttcctgaaaaaaagtagagatggggacgtaaacgacgttaactgaaaacccatcattcggcgtactctatatcataggttcaaaaatggagctgtagttttgatatagttctagtacgagtttcgtaattttgacgccagatgcatagttttgactagcatacgtttacactagctattgcaaaacagcaaaattcgccaaaaacctatcatacagcgtatactatatgataggtaaaagttaacgtcgtttagagcatctccaacggtagtgcaaattgcaaaagtgataaggcaaagtgaatggccgattagcaacataaacaagtcgatgacgcttgaatttttttgcaatagttcagcttccccaacggtattgcaaattgcctagtgaaagcgggtagccctccctccgcaatggttgaacatcccatcgctgtactacacgacgctgatgtcccaggtagcaacggtgtctgctctggaaaatcccaacgtcaccatgatcggcacgacgatcctagcgttggggccctacgataccctcgagagcttcaaggccggctacgatgcgcttgagagtgctgggttgatcgacacgcctcgagcattcgacaacagcgacgagaacttcggtgccatgcggctgggcatccgcggctacaagatcaagctcgtgcagtctggagagtggtcggaccctctcgacagtctttcaagctcgctggtgctggagcagtgcaatgatgacaccatcgacgcggcgatctccaaccacaaggtgttcgtgcaagatttctcgactctggggcaatttacggatgccaacacgaccacgactaagtacgcgccaaatatcgtcggcttcttctgcaacaatgacgcaagcggtttgctgctgccgctggccatccagatcgtggacacgggactcacgtacacgaaggaggactcggcgggggagtggcagctcgccaagatggcgctggatgcgacggagctcaacttccagcaggtcttccacttggtgcacacgcactcggtgtcgatcccgatccaggtcgagatgatgcgcagtatggccaaggaacacccgatctacgcgctgctcaactatcacttctttgcagacatggccatggagttccttggtggcgtgaacttgttgtcagcgggatcgccgtacgatcgggtcgcggctttcggagccagtgggtctgtccgctatctcttcgccgagttcgcaaacacctccatagctgtcgactttcctgctgacgtcgccgacaacggcctcaagtatctttctaaccaccgctacgtcaagtacggtgcgacgtactactcgatcatcaagacgttcgtcacgtcctacgtgaaagcttactacgagtcggaggaagcgatccaaaatgactcggagctgcagacgtgagctaagccgccccattcagtacgccagccctgtacaacgcgtcactcccaactgagaagggcgtgatggttgatccgttcgactacgtgatcccgacaagtgcgttcctggcactttcgggtatggccgttcgcttcttccgcccaatcgcgacgaccaattcggtgctgagcgcgtattcgacgtcaccgttttccgacgaagctgttctagcggatgcaattgcccagttccaacggagtatggctgctatggaagacaccgtcgacgcatcggaggctggagaaacgtacccgaacacgtttgtaaagccctcacttctgccgtggttctcgtacatctgggtgagattacggccacacgcagccgcctaaagcaagaactacgaaatgcccgctcttttctctgagcctcgtctcgttccagctactagtaaacattattttatgttatggtaaaattctcgttttatgttatggtaaaattctcgtgaggagcaaagatttacttcatgtaacatgcaaaccaaagttctgagcggattaagacagttcgatagtgttgcattatttaaaataaacaaaataagttattttgtagacaatgttcatgttcgtaataatcggttggaacgacatttcgacatttaccactcaggttgccgaggagtgtttgttcaggtgccgaaacggtagcttacataagtttgaactcgcccgaactgcttattcagtgaacttgacattacgcgtgctgcaacaagttgttgccaacatcatacagactgggtaagccctcgccacaactttgtgagactttacttaggttttttcttcttcgaacgccgacgacacacaacgatttacgacggcatctcagcaggtgcttgtgggcaaacttcatgtatagcgagatcgaggttgatcgagaggagaaacgatcgagttcccgcttgacagctggagttacgaccaactagacgaaattcatggggccatcatggatcgcctgttaaatccagcttctacgacggcgacaatctcagtagcccatagctacatacatttacgaccaccacgacgggtggtccatagagatttaggattcctattggctgagagcagcatcttttagccaatgagcgacatgcatagcattggaattctgccaaccagccgttggcagattcctatcttagcatattacatttagaggaagtcagaacaataaaacaaaaatagcagttctgagcccaagtcaacaacctccacttttgcaacgacgtaaaaaaataaaacttgcaaaagcaaattgccccgacaaaaagcagacgtaatctcacaaattgctagttgcttgtagagtgtttccacacctttcaccctgagtcacaagttttgcatccaaagcattgacaacgatcgatctcttgaaacgaagcagttcggatttgacgcctagtaacccagcctagtccagcgcgaccagtcagactttttgactcacaagtagtgacccaggttgcttcagctctggcgacaatgggttccaggtctgcctgagctaaattgtatgaaggactacctgcctacaaccgcccacgagtagacccccttggtttgtacctcactcttccatttgccggctccagacgacccaccaaaagccccgctacgcctcgtatccgtgccccaacaccttgatgaagctctcaactgctgtcacgacgtttgccctggcatcccttccggcctgtaatgcggcgttgagtatcccatcgcccaatgacaccacacgtgctgcgaccgtgaagcagacttcgactgaaatcgccaacgtcgaccgccagttccttgtgggggacaccttcttcccgatcaaccctggacctgccttggcgattccgtcgctgtactacacgacgctgatgtcccaggtagcaacggtgtctgctctggaaaatcccaacgtcaccatgatcggcacgacgatcctagcgttggggccctacgataccctcgagagcttcaaggccggctacgatgcgcttgagagtgctgggttgatcgacacgcctcgagcattcgacaacagcgacgagaacttcggtgccatgcggctgggcatccgcggctacaagatcaagctcgtgcagtctggagagtggtcggaccctctcgacagtctttcaagctcgctggtgctggagcagtgcaatgatgacaccatcgacgcggcgatctccaaccacaaggtgttcgtgcaagatttctcgactctggggcaatttacggatgccaacacgaccacgactaagtacgcgccaaatatcgtcggcttcttctgcaacaatgacgcaagcggtttgctgctgccgctggccatccagatcgtggacacgggactcacgtacacgaaggaggactcggcgggggagtggcagctcgccaagatggcgctggatgcgacggagctcaacttccagcaggtcttccacttggtgcacacgcactcggtgtcgatcccgatccaggtcgagatgatgcgcagtatggccaaggaacacccgatctacgcgctgctcaactatcacttctttgcagacatggccatggagttccttggtggcgtgaacttgttgtcagcgggatcgccgtacgatcgggtcgcggctttcggagccagtgggtctgtccgctatctcttcgccgagttcgcaaacacctccatagctgtcgactttcctgctgacgtcgccgacaacggcctcaagtatctttctaaccaccgctacgtcaagtacggtgcgacgtactactcgatcatcaagacgttcgtgacttcttacgtgaaagcctactacgactcggaggaggcgatccaaaatgactcggagctgcagacgtgggcagctcgagcgacggttgtgtggggcgtcaatgacttcccttcggccttcacgggatacgacgacctcgtgaaactcgtgactaacttgatctttcaaaacgccgtgaagcaccacttcatgaacggccgagtgacgtggcacagccaagccgccccgttcagtgcctcagctctctacaacgctccactcccaacagagaagggtgtggaggttgatccgttcgactacgtgatcccgtcgaacgtgttccagttgttgacgggcttggcggcaggcttcttccgtccgatcccggcagccaattcgatactgaatgcttactcgacgtctccgttctccgatgaagccgttctcaaggatgccatcgcccagttacagcagagcttggccgatctggaaaacaccatcgatgcgaccgaggctggagaaatgtttccgaatattctgaccaagccttcagtgttgccatggttctcctacatttaagctacaagtagcgtacaaggctgggtgagtaaagccttatcagaagcaggttagcttattaaaccaagaacgctacatgcttcccctatcatcctccggatggtcgcttcaagcggattttaacatgtaaatcccactggcgggaaatgggaagatggcattgaagtaggcagccagaagactcgaacacgggttcacctctgttggtggtgttattcttgcagctgttttcccacatcacgatggtgtaagagctatcatcttgctagcgagttgtgtcctatgggggggcacttcaatcaatcaaacacgtgaactaagtgaactaagtacgtgtagtacgagtccaaacgcggaaatttccgaaattggtttgattgattgaagtgcccaccgtaccgtcagcctcacttcaaaagaaagatggccgcccccgcgtcgttgacgttcgcgccctgttgatggagtggaaggatctagacccagaacatgtcgacctctacgtcttgagcggcgtgggccggacgctgctccgcctggagcgcagcggcttccagtgctcggaggcagctccgttgctgctgctgtgtcctgacccgagcaactacgaggcgtccatggcgtacttgcatggtgggaatttcgcgctacgtccaggaaccccaggccaacgtccgtggcccgaccaagttgccgaaggaaccgcgttggccgacttgccttcaggtgtggatgcagctcccccctccgcactcggtcgcttcctcgtcgagcgcttccccagcgctgtggacatgacgggaggaaccagtatggacgtgatccatttgccggatacggaagtgttttccaacatggctttagccgcgctaaactccgaccagttttctcgctggggtccgttgtcggccaagcaattcggtttacccgttgagcctcagctggtccgtccatttgtcctgaccaaggtcaatggacgcccgtactttcaagcgcactttacaatggcgtaatggtgtcgcgctggagcgttgttcaggttaccatcttgttggggactacagtaggcagcttccacgaagaaactaacgcaacaacacgagaaaaacaaaatgacgtttcgtcaagtaatacgtcgtagatatcggaaagtgtgccatatgcatttctcgaacactcaactcgaaactcctgggtataagcgagctcgtcaccagcggatcgcagcctgtcgacacctttcaaaacaacacgcttcacgttctccgtccgcacattctcttagcagatatctcggctaagtagttagttagttgatctcgtcgttactgctgtacagtagctcggtagctcagtcgtcgacctgctccttctcgtccacgatccgctgcagctcctgctcgaaggcgcgccgctcgcgcgcgtccatctcctcgtccgtgagcgcgggcgacacgcggctcagcaggcggaaccagagcgggaaccaaatggcgacgtaggccacccaccggtggatctggtcgaagtagtccgtggcctcgtagagcacggtgcaggccacgcccacgacgccgaagatgagcacgtggtgcttgtcctgcagcgggccgtagtccgggatgttgtcgcgcttccacggcgccacgggctcgaactgcttgcggtactcctcctcctggcgcaggaactcctccacgcccccgtcccctcgctcctccggcagcggcttcccgttcggcagctcggacttgggcacgcggcgaggcatgacggcgattggcgcaagtcgcaatgtgacggtctcagactgactgactgacgtacttttggtccctaaaatggtcacacgacccaaattttgggcgcaacctttcaatccacgtcactaatcgatcgaggatggagaagtacagccgctggtcggacctgacgacgggcatcaacccgttcgtgcctcagcgccggcgcttcacgtccggctggcccgtgagcatcttgcaggtcgtctcggggtcgctcctggcgctggcgcgcttcccgctcgtgctcgtgggctccgtggcgctcgttctggtgaacgtggtggtgtcgatcctggccgtgatcccgttcctggggcggctgctgaagcgcgcgaccgagtggctgctgtgctccctgttgctattgatcttcggcgtcttctcgtcggaggaggccgccaacacgcggcgtctggggctcgctacagccaaagccaagagctccagcggctcgtcccgcgtcggccccggtgacgtggtggtgtgcaactacacgagcttcctggaggttctgtacctggccaagcgcttctcgccggtgtttgtgttcgccacagaggggaagagcgatgacgggggcctcgtgcacgtctgcggactcgtggaggcgctctaccggtcgctggcgctgcccgtgagcgcggagcgcgtcaagcccacgaggaagatcgcggacgtggtgaaacgcgcctcagggccggtcgtcgtgctgcctgaaggtgctcgcagcaacggcaaggcagtgctgaggttcatccccgtgctgcagaacctgccgaccaagacgcgcgtgcacctcgtggcgttccgctacgagttcaagcgcttcagtccgagccacacggcgggcggggcctggtcgcacctcttctggacggccttccacctgtaccacaccatgcgtgtgacggtgctgaacgccaaggacctgaacctggacgacctgacgccgaccaagctgccgagctccaagagcagcaagaagcagggagactccaagacgctgtccacggaccaagtcgagaaactgcgctcactgctggcggccatgctgcgcaccaaggcggttgacttgggaccggaggactttgtctcgttcaacaactactggaatcacgtgaacggcggcggacgccagccggcgtcgcagttcacggaccgcaaggctccgcacgaacatgctcagtgggccaagagatagagaggaacaagcgccggtgatgggctggcgttggtagagtgtgcttccaagtccgtctaatggagataatgttgtctccgtcttctcgttcttcttaacctggatcgtcttctggatcataattacctgcgcaactaattcactgttcgatctaagccagcttcatgagcaattcgtagacaccgatacccagctccacggaaatgaggatgataatgtaccactcgagccgctcgcccttatgggagtccagcacttccaggaaaaactacacacgcacaagacagaggaggttagcaactcgcataccaggcatgaaccaaagttccaagcagccgacccaccttggtgttgtgctggatcagttccagcttgaagttgaggttctggaagcgctcgttcagctcgaactcttcgagcagcgactcccacatgttgtggtatctggtttgactccaggccgggtctcctggcctcttccggtcgatcacacgcagcttgctcacgaggtcgatgagcagtgtgttgttggacgccacgatcttgaacagtctcttggtctgctcgttctcgcggccgaagagcgctccccgcggacccttcttctccacgtccgtgttgagcttctcgaactccctcagaatcgtctcgcactggcgctcgtagaactccagcgccaccgtctgcgagagcacaccggcaatgacgtgcacattgatgtggtcaatctcccgcaccagcacgttgttctccaccagcgtgctccacttctgctgcgccgggtctccaaccagcagcatctcctcctcatggccacgcatctcgaacacgtcactgcagaagcgcgtggcgtgcttaatcagcgtgttcaccagcgcctggtcgcagttgaagaacaccaccgctccatagtcgaagtacaccacccacttatccgtggcgcgtctcgacgtgacggtcttgccgcctgcgccgacgctgagcttcgtcgtgtccgcgttgctgttgttgctgccgtggatctgcaccggtggtggcgccacacccgtgaccagaccggcatgaccattgttcttgctgccactgagcctcaacacgattgagtccttgtgcaggtagtgcgtcaccttgaagcggtccgtgtagagcttctggaagaggctggcgatgtccatcttgcgcgcgatgtggacggcgcggatgggcatgtgctggacccttttggccatctgttggctctgcgcctgcgcctccgcggctgcgatggtggcgtccacctcgtccgccgtgggcagcggcggcaggtccacgcccagaccctgcagcgtcacgttcgaagatgtagccatccctctccgctcgtggaaggacagcagacaggatcccgacgccctggacactcgcgaagacgatgcagagccgatggacgccccgcgagcggcgcagcgcgcgcccacacgccgcaggaacatggcgcccgagaggtctgctctgcacttgatggatgcagcggctgtggctgtggctcgacatcgtcgagctgcgtatcgttagtgtgtgccacatttatgatatatgtgcgccacacaactcaagtccgccaatcagcgcgcgcagcctatccgcctgatacagcacgtcattcattcgcaaaggtagtcgtctaagaagtgtagccatgtcgacggagctggccgtgcaggcgttcccggaggagcccgtgccgctcatcacgttcagcgaggacgaggaccagctcaaggtgaacgacgaggccgtggggctgctgcaccgcatcgacggccacgtcgccgtcgtggccatggcggggctctaccgcacgggcaagagctccatgctcaactggctgctgggccgccagagcggcttccgcgtgggccccaccatcgagcgctgcacgcgcggcatctggctctgggggcagccgcagcgccacgtcatggccaacggcgagcccgtctgggtgctcatgctggacacggagggcatgggcggcctcgaggcctcgcagcagtacgacgcgcgcatcttctcgctggccacgctgctgtgctccaagctcatctacaacagccagggcagcgtggacgagaaggccatcagcgggttgagcttcatcgccaacctggccaagcacgtcaaggtcagcgcgtcgggcgacggcgaggacgaggacgccgtgcagtttcacagcttcttcccgtccttcctctgggtggtcagggacttcacgctcgagctcgtggacgaggacggagaccccatctccagcagcgactacctcgagagagcgctggccgaccagcctcgcacccccgccaacatggagcgcaaccgcatccgcgccatgatgaaggacttcttccgcgaccgcgactgtgtcacgctcgtgcgtcccgtgcacgacgaagccaagttgcagcaggtggacgccatgcccatcgaagagctgcgccccgagttccagcagcagctcagcgacgtcaagcagatcgtgtacggcgacagtctgcagcccaagatgctgcagggcaagccgctcaacggcagcatgttcgctggcttgctgcaggcctacgtggcagctatcaacagcggcggcgtgcctgttatcacgtccgcgtgggaaggtgtgactgccagcgagtgccgcaaggccatgtccactgctgccgacgccttcaagaagagtctggccgcgctggacctgccgctggatgacgaggacctcgttgaagccatcaaggaggccgaggagcaggccgtggcgcagtaccgcgctgctgctatcggtgacagcgcctcgaagctggaggtcaacctacgcaagcgcatggacgacgacaaggctgtgtgtgcacgcaacaactcggcgcagagcaaggagatgtgcgaccgcttgctgcaggtgctgtacgccgagcagatccagcccaagctggccgctgccagcgacgacgactccggtggcttcgccgacattcagcagttctcgcgcgagtggcaggctttccgcgacgcgtacctggccaaggcccgcggtggcgccaagctcgagtgcttgctgagtttctcggaagccaagtacgccgaggccatgcggatcctgctgagccgacaggaggagggctacgagaaggagatccggacactgcagggcgacgtgtccaaggtcaaggaggagctgggcagcgtcggcggccgcgagcagatttacaaggagcagatcgagcagatgcagctgcagtcgtcgcagatcatgtccgagaaggcgcgcttcgaggccgaagccgagacccagcgcgagcgcattgccaacctcgagagtttgctgcaggacgaggccgccaccaagcagcacgtggagatcgagcgcgagtccgcgggtctcaagctcacgagcgagaccaagaagcgcgaagaggtggacagcgagctctcgcgcatgaaggccgagtacgagcgcgtggtgcaggagaaggagcggcaggagatggagctcaacctgctcagcgaggagtgccagcagctgcgcaagggccagacctgcggctgcaccatctcctaagtctattgtgaccaggcgtaccagtccttgtcaatttccaccctcgacgtgatgcatatcctagataacaccagcaacacattttccccttaaacccgcaacacattctctaaacccacggcaacttttttctctaaacccgtcatccgattgccttaagtgaaaaaagaagaaagctgttgctgttgctgtcgcagttgccgtccctatcgctctacagcggacggcggttgggcgtcagcggcgacacgtaggccttgagctgcaaaaatgcaaatgcaacatttaacaccaggttagagagtgctaaagggagtttagggggtggactggcaggctttaccttaaagcccgtgaggtcgggcacctcgagctgcagcagcttatcctggtccaccacgtagcggccgcgcttggcgtgcgtgccctcgttgcggcagccgttgcccttgtagaagcggcggttggcgcgcttgctcgtgagcgggcgcagcgagtgcgagcgcccgaacttgctcttgcgcgcgaagcccgtgatcagtccgtccagcaggcccatgctcctcgatgctcgatgtgatgtgcggctgccagtaaaatagtgccaaaagtggtgtgcggtacacgaattggatggcaatccctatcctatcatttggcattggattttgtatgctgaatgataggtcgataagttgaagtgcacttcaacttcgtttcctgctatgtatgtccctggtctgttgccgacttgtatctatctgttcaccattgacgacccagcggagatgaacttcttggcggccacgacccaatcgatcaggtcgctctggctcggacactggaatgtcagcgtgcgggagaccccgacgcgcagcatgctgcccagcagaccggacggcggactcacctccgtgatctcgaagctgggcgtcgcgctcttgcccaggatctcgatgcggcagttggttaaacacaccgactggctgttcacgtccgtcgtctgctcgttcgtggagatggcggccagcatggactccgtcgactccaagatggagcgcgttgtgttctccttcagttctagcaaatgcagacgcccatcttgagtgatgacgcacagcacgtctttccacgaggaaaacagcgacccgctcacttggttcttcaggaacccacagcgcaccagcagtggacttgcaatgggggaccgcaacgttgaaaataactgggtgtctgtatcttcagacgccgatagagctgctgctgtgtactgcgaggcaaaatgaaacaaaccatacaagttagtgctacgtattgcaaaaatgctgcagcgaagcaatgaacgcacgtacatttttcggtatcctccgcatgctctgcacgagatctcgttcgggatcgatccgctgcaatcataaatgcaaatacagcaatataattagactttgtccttgtatgcaatccatttgagtgttagaccgtacctgtgcagcagccagaggttctgccattgcgcctgccatctcaccatacgcgagcttctgtttccgaacgtaagtgtccagcgccgtctggatcacagacgccctccacacctccatcgtcttgtactgctggaagagccccgacatgcccgtcacgtaccccacgcggcactgctgcagcttctgcacattgatgcagtagttcatctccgcaagccacaggtcctgcctcttcaccgccgcctccttgtcgctctcctcctccgcctccatctgcttaaacaactcttcgtacttgccaaacgccgtcagcacgttcttctgcgactggaacagcatggcgtccagcttctcgccctcactcagcatcgtcgccatcttctccttgtacgtggccgccatctcctccagcggcttggccgtcacctcgcgcttcacgactgtagtcagctgcaccagcttctccgccagctgttgctgcacttcgcccactgcgtgcagcgccttggccaccgacgactgcacgctgagctgctccgtgtcgctacctgcggatccttcgctcgctggggcgtccagcgccgcgcgcgtctggcgcagcgcctccgcgtacgccaagtcggcctgcatccgcagcgcgaagaagcgcagcagccgcgcgttctcgtcgccggcgcggcggatctcgtcctggaactggcgccagtacgcgcggtcgcgcgcctggaacttgtcgatctgcgcggcgcggcgggcctcgaaggcgcgcaactccgcgcagctctcgctcttaagctgccacacgaccatggaggtgagttctggggctgctgggggttcgggaggcgccacggacgcctcgggtgcagcggacgcgggctcgggcgactccatggtcaagtggcgggtgcgtcgttggatcgatattgagacagtgggaccaagctgaaaaaggacaatatttacaatacattttcacaataccacgaaaagttgacttgggtccaagcgccatcgacatcaagccgtgcagcttgtcaagcagagaataaccatggcgacatgcatacttgcgatttcctccgagtcgacggcccaagccggggctgaaattatcgatctggaagagatcctccgaatctgtcatctgcgagtcggagacgacagccgtcctgtgataaatgcctgtgcgcagagatcgcgaacttcttgccgaggctacttggcgctgcgccacctttctcatcagctcacttcccagcgcgagcagcaccttcgtatttttcaggagacctccactggtattcccaatactcttcatcagaacatcggttctcttcatcgtggcgattaatcccttcggcgtcgcatcccgctctcccagcacggaaatcttaagcttagccgggagttcgtacccgacatccttgaaggtcttgtagaattcgctggtttcggactcctgaaaacaaaacgaggtcgtgcagacccagatctgtgcagcttgtggagcttcagcagaaaaagtaagagcttttccgccactccccacaattcctctggaaggatgacgagtcctcactctgagaacccagacctcacgcgcgaggaaatagtacttgccgtagccgctgaatgcgcagtgctgcccgatgcgaactcgcatgtcgccagaaagaccaaccttgcacacgcgctggctattgccatcatcgaacccatgcaagtccgtctttggttttgcagtccttggccgggccgacgcccacaacgcacggcctcggcaatcctgccgttcctgatcagctggaggaagaaggccttgagcgagggcccctccttcggatccgagtcatcatctgcgcgaaggcctcgttgctggcaatgtccttgagcttgacgtagccgcccgtactccttggacgcagttcctgaaccgggatctcccgccactccgccgcggcctcgtggaagtaccagcagacgaagccgccatcggtgagcacgtcagcctgggtggcgccgcgcacatgccgcctgtactcttccgcgaggatgccgaggcgcacggcctcgtccgcgcccacgtcgttcaggtcctcggggcggaacagctcacgcagcgccacgggtccagcacggcagattcaagaatggcgcgcttcaagcaggccaggctcgtggtgtggaccacccgtatggtgcgcgacccatctcggtgattcacatgctacgttgcgcaactcagtgcgtgaatcacacagatgggtcgcgcaacacatgcgtggaccactccatgctacttcagcctgtccgtgaaggaaaaggcaacttgatgtgcatgtggatcgccatcggcaccaccgaccggtgtgaaagtgcatcactgtctcggcttgcttccgcaaaatttcatccgctgacatgaactccacggccaccttgactcacgaagacgctacatgacccccccccagttcgcataccacaaaatatttttgtatcgatagcttctttttcaggtcataggcaggtcaggtcatgcgaggtcacgcatgtgctcttggcgcgactactgtaaaataatcgctacggaagcagatgactgacatagtcctggcaaccgccttccttctagtcacatgccagccacgcctgactgaggaactggtgggacaggaaattagcactggtacgactaactataaactcgtatacggctgccatgcgtcgtcgtagcatgccttgcctttgcttgaagtaccagtagagggttgccgctggtccacctcctcgacagcatcgtgctctcaatcggagtagctgtaggcctcttccaaggcgatgttcgctcggtacgtcgtgagtgggacgagcggtggcatgcgaactggcagtgaagacgacaggaagtagcccgagcggagcagggtcacgatcctcgttggacaacattggaggagcaagggcaagctcatgtgtgacccaccacgctagagcgagaacatcagtagagaaggttttgatcagatacataattaggatgcatgttgtaggaaattaggacggagacgaagacgtagggacgattgccgtagccgccgggtaagtgagcggaccggtcagcggagttcgatgcagtgctcgcccggagcgctatcaacggtaaccgcaaacatcaaaataaaaattctgaggtgatgttcgcaagagcgccccgcacgtcgcctcgtcacgacgccccagccagaattacaccactccccgttggtaccaactcctgtctcgctatgacagtgacggacctcaaataccagtcttgcaccagcagataccacctcagcaccagcagcgaaaaagacgcaggcagcagcgacgacaggcctcagcgcttaaacaacttcgacatcacacagcgattcgaccgcgagttcgatctccaacaagaacgcgtggagatttaaccggaagaccaaggcgaagatgatcaagaagacgtggagcacggacgccggtcacctactgaaacctgggcgaaaagaaccgaaaaggcatccacaacgcagtgtctgaagttcaacgctaccttgagcgccagccgtccagttagcacacaaaaggcgtcaatgccagcgttacacagagcagagcaactcctgagtcaccaccgcttgcaccagcaacttccagtccagcacttcccggcctgcgcttgatccgcgtctacaagtctctgcgtaccaatactcgtgacgaacagtcagtcaattaggaagtgatatagagtgaattatcacgctgggggcaactggggtccagaccaccgaaggaagtggccgctaccgttccttcagcttggcaaaactatgaagtaggagaaagtaatataacaggctgaagcaggccagttatcttgctcggcttgttgagcaagtcgtatagctgcgctgcgtcggtcctacttctcgtcgctgcaactctaacaccttctggccgacagcgacacttcgtcactgcgcccgatcgtccacctcagtgcgtccgaccgaatttattaagggggttgttaaacctcttctatcacgcaagctaatgtcaacctcttgtcaacactaacctacgatcacgttctcgttttccacgcagggttcccggctccgaccagtcactccgcgcttccgtcaactcctcgttcgtctgcctctccctcgttcgtgtagagctctcgctccgtgtgctgcgtgcctcgtgagcctgatcgcgttcgtcttgcgtcttgcggcgcaattctcgtagtgagcggtctccgctcgctgctcgggccctccagccccgtccttcaacgtcgactcgacacaagctgctgcgtgcagctcggtcgtgcccttcaccgtgccactcttcgttattgtggccactcaggagctgtccgcagcttccgtccctacctcttggaccgctcccgtgccgcccatcgtcatgctgtagcccagcgaggacgtctgcttctcgtcgccctgcgtcagcgtctccgccgcctcgtggtcgtcctccgctgcctgctgctgcagatgggtccccctcgttggcccacctgttacacaacttctccatctctagggtcttccacgacccttccatcttgtagcaaggggtcatactctttaaccgtaatccatcaccgtcctccgttcttccgtcgccgtcgtccaccgtctcgctgtacaggtcgcacctcgtactcgaggacgtactgtcccgctgcatttcttcttcgtcgtcgtagctccaccacgtcctcgtccggtcgctgtttcgtagtcgtacttgccactgttcgtcgacgccgttttgtagttcctgcagctggtgctgcacgtaccggagccgtcgctgctccaccagacgctccgtccgtctcgtcattaccgtcgagctcgagcgcaccttcatgctccagttgcgcttcaatgtcagctgctgcttcctcgagtagtgtagctggctgatggtagctaactaaaaatgaagcatgtgctaaatattgctcagggtcgtgttccacatcttctcgttccaccaggtaattgtcatagcctactggctccacgatcctcactggcgcaagccatttatgtaccagcttcgtcgccttgggacctcgtggcggcttatagaaccacacacggtcgccaacttcaaacacccgcttcctccgcacctttcgatcatagtagcgttcctggcgctcctgctcacgcctccttgccgtctcagcacatgcacggctgctctccatggccgtcaccagccgtcggtgataattcgtcagcgctcctgcctccgttacgttcgcaactcgtagtaggtcattggggttacggagcttccgccccatcatcagttcgttcggcgacagcatcaccgtcgagtgctggtcgctgttgtacactgcgaagtctacccaaacatcccaatccctctgcttctcgtcgttcatgtaggtggcgatgcagtcctttcatgtgcggtggaaccgttctactagcccaatcatctgcgggtgataaggtacgggcttgatctgctgggcctgcagcatgatcaccagctgctcgatgaccttgccggtcaactccggcgccccatccgtcaacaactctctgaatgtaccaaacttcagcactacgttcttcatcaggaaagccgcaacgttctccgcggtatgctgcttcaccgtcgttgccacagcgtatcgagtcacgtactcgactgccgcgatcacgtatcgttcgccaccatcagtcgtaggtaagggcccagctacatctaaagcccatctgccgccaacggcaccaccacgtatacttctcagcggagggatcacctctctcggccgtgccttgcgagacccgcattcctgacagcctgccacccagcgcttcacttcgcgcatcaagttcggccaccattacgtctgtgcgatgcttgcgtaggtatgaggggctcgtaggtgtccagcccacacggagtcatggcactccttcatcactgtaggccataacgccggaggtaatacaactcgtttccctttttgcgtctcgatcgtcaccagcccaaacatcctcgtcacctgccgccctaggtgttcgcccgactccatcaagcgctgcaccaatcgactcttccgctgcgcatcaatgatctcggcatcggtaagttgaagtgccggtccacctgcgcgtcgtcgtactggttcatgctcacgcagttcgtcatcacgtccagatccacgctgcttctcagcatttggccgtccaccgtcgttatcgtcatcatctcgctgctcgtcatcgtctcgtcgatcgtcatcatctcgtcgaggtgtcggcttcgagtgcttgctcgtcgtcgtcactgccctcgccgtcgctggccgcgacttcgcactcgccgctcggttcgtcgtcgtgccagtcttcgctacactcggaggcttctccgacgtcgtccgcatactccgtcgactcgatgcacgggtcttcgttattgtcgtctcggcctgcttccgcgtctgcacatccttggttgtcttcgccgcgtccaccgtgctcgccacctctgcggcgttcgtcacgccagtcactgccgcatgtactgcatcctgctcttcgtgacaggcttcaactcgttcgttaccgcccaccagcgggtccacggacgtcacgcacttccgcttacgcgtcacgctgctctccgtcaccgcgtggtcactcaggggcatcactgccgtgatctcgccgctcgtcgtcaccccctgagccactgccgtgactcgcatattgtcaccggcacgaggctgctccccgcgtgctccgtgtcgtccaccggcacgtccacctcgccgtccttcgtctcgttgtcagacgccaactctcgccgccgctgctcttcagcatgccgcttcgctgctcgcgtcaagggtcgctcagcgttcgtaggctctacgcgccgtctcacgcgtcgcttcgtgtcggccttcgggatcttcgtcaccgccgcctccaccgtaggttgaacggtcgtcactccgtccgcgctcaccacagtcatctcgttcatgctgccctcgtcgttcgtgtcctcgggaccctcgtcctgatgttgctcgttgctgtcactgccgtcctgcccgtcagccgtgttcgttgctgccagctgtagagtaggttgcgtgcttgcactggctgtcgtctccagccgctcagtcgtcgtcttcgcacttcgttccgccgctcttgtcggcacagacccaccgccactgccgtcttcagctcgcacttccccaccgctgttgccgtcacgtactgcagatccagctgccgtctccatcgtgcccgccgttcgagcagccgctcgtttcttcgcccttcgccgtcgtccgacagccgccaataccgtcgccaccgcaggtgctcgggagagtgcatctgcgaccacgttcgtgctgccaggtcggtactcgacctcggagtcgaattcctacaaggtgagtgcccacctatgcaatttacctgtcaggttcggactcgtcatgagtcactttagcgccgagtgatccgaaataatcgtaaacattctgccatacaggtaaagacggaagagcttgatcgcccatacgaccgccaaacattcctgtgacgcggtgtcgatccctaaattcgggtgaatgcacctgaacctgggaagtcccaatgatgtggagcttcgtgatactggatgatttggagtctcctataaaaacaagggtaatgtctgcgaatggacgctgaatcccggaagattgatcaatgtgggcgagttgatcccgttccatgaagtgcaacggaatgcgagcgatcctccccagtatatctaagtacggcggaactcgactctggcttacaacctgggagctgaggtacttctcagattccccgttgttttcccggaataacgattcccagacttcgcgttcccagacttacatcccacaaaattccaagaacgacctcggcttgaggcgttccgaggctccaaacccaagaacacttggtttcactatggcatcttccaagatcctaggtgtacccaacaactccgagaaggtatccagtttggcgacccttcaaggccagaccaacactccgcagaaagatcgcagtctccgaagggccgcttaggaaagatttcgtctgcatgtgacctttaaccaaacagagttcgttttacttcgaagggcacaagtgcttctttcacagcctggaaggccgttctccacgacaaaattcaaagtactttaggtaagtgatccactgcttcggcctggaagtgatcatatctattccatatctgtatatttgggcggattgcagaccgtctttgttgtatatttgcggtctattgggcctctgtcgaactgaagaagttggcgacagggtagatcgtttcctctctccgagaggtggtgcgcgtccccaagattgatcaagtgtcttggatttggaccagttgacttgtattttggccttagccttgggcctagagaaagaatagagggcaaagaagtatttgtgtgattgtataacgtgtataactctatttgggttggattgttctcgcgttagcctggcgtagctgtctgattcacggggtcgatactaacctcctggtgaaaagaaccgctacccaagggatacacatcgtgcgcctgaccaacagcgtgtactggacaacacacacctgtgccagccgacacggatccaaagctctagtagcctgaggtctgtcaaggagggcctataactgctttccgggagaaaacaccgcatcgcctcgtcatattccaactccgtgataccgtacttactttcagctgtgttgttcatcttgctggtataggctacaggttgccagccggcgccatgatcttgcattaggcaagcgcccagacccaccgtactcgcatccgtcgcaacccgaaaaggcagcttaaaattagggtagatcagtagcgatttcgtcgtcagaatcatcttcactcgctcaaacgccgcctcttgagcaggtgtccactcccactcgacatctttcctcaacagcttcgttatcggggccacgatggacccaaagccctcaacaaaacgtctgtagtaccccgcgagatgcacaaaccgcttggcctcaactgcatctgttggcctcggaaactcctgcacagccgtcaccagccgctgcaacggtcgcacaccgtcactgctcaacttatgccctaggtactccatagatgtagctgcgaacatgcacttcttcaacttgagagtcagcccagcctgagccaatctctccaacacgttggccagctcgaccacatgccgctcgattccacctcgagtgaaaaccgcaatgtcatctgggtaaactacgcaagtcacccaggtcaaaccacccaaaaccccgttcatcatcctctgaaacgtagaggggacattcgtcaagccaaagggcatgcgaacaaagcgataaagccctctcttcgtggtaaaagccgtcttatctcgatcatcgggtgccacacggatctgccaataacccgcgcgtaggtctagagtagtaaagggcaatgcaccacccagagtctcaagggtttcgtcgatgcgaggaagggggtacacgtccttcttcggcaccttgtttagagcacggtcgtctacgcaaaaacgcacttccccatctttcttgcgtaccaggaccaccggaaaaccccacgcgccgttcccttcttctatgacgcccgcattcagcattttgtcaacattctcatcgatgatctgatcctctgcatgtgcttgccgccggcgcttcaacatgatcggcgctgagtcacccgtgtcaatatggtggttgatgtccaaggctgtcgcaggaggacaatcgccagtactcgcagtcaactaacgatagacacgtagcaatttggtaactaatacacgtgcatctggttcatcaactccaatgtgtacttcgtcttcgtcatccaggggcgtcgtactgtcaccaagttcgtcgatccactcactcacacgctgagcgtccagctcgccactcatcgacaggatttgcatatcgtcatcgacaggtatccacgtgtccagctccttcttgttaggtaatcgcgctgactcattgttcgtgttgatttctggcacccaggctcttccgttctgagccgtcgtcaccgtcgctgccaacaacactgaccccgtgtgcctcgtcggcaagaacaagccgcgttctccatcttcagctgccaccgagacttcaacaggcgtcactgcattgctcgtgagtctaccatccgtacagctgcgactcgtgctcctccagcgtcgtcatgcgtccggaacggtatcacgaccgctcgccctccgtccgcgtaccgcacttcattgcgatcgaagtccatggtcgctccgcgcgccctcataaagtcgactcctagtagaaactcgtcggaacagcccgacactacgcatgcatccacttcgataacttcattgaatacagtgcacagtttgaaccgccatactcccagcacgtcgagtagaaaccccccgatgccttccacgtagtcaaccggagcgtccacagcctgcttgtcgccgtgggccatccactcagtgcccgctatagtgtagcgcgcgcagctgtcaagtttcacgcgtctcgaggcgccattcacctccatcattgctgtcggaagtccgtcatttgcccccacgtactctacgtcatcatccttcactgcccgtggcgtgttcgtcacctcgcgcctatgcttgaccaggctcacacgtgccaagtcactcggccgtgtggagcgttcgtcatcaccatcacgcagtcgtcgttgccgccgttcgtcaagtgcggccacggcttcggctgccactcgtcgccgttcgtcacgcagctccgtctcagcccgtcgccgttcatcttaggcctcacgttctgctcgccgtcgcttcaccagcagagccttgacccgcagtcgcttcgcaaccttgcgagccttcttccgcgcgagccgtgcttgctccacatcactacctgcacgctcattgccatctgacgagctctcgctcgcgctcgagacctcgccgtccaccatcaacacgtccaccgtggactcgttattccccgccaccgtgttggtcatcaccgacgctttgggcaccgcagactcatcgttcgtcatcgactcgttgctcaccgtgagctcgagcgcctcattgcccttgtcttcgttgtcagccacgccggctgtcgcctgcactacttcgttcgtcattgactcgtcagtcgtcatcgactcgttgttcgtcatcgactcggccgtcgagttgccctcgtcctcatcgtacgtcgcgtcggtcgttgccttcacttcctcgttcgtcatcgctgctgcgctcgtcgacgtggccgtcgacgtgcacgtgatcacagctgcagctgagtcagctgtcggctcgccttctccagctttgcgtcgcccggcgccttctccagctttacctcgttcgtcatcatcgtcatctcggggtagtgtctcgccttctccagctcgacgtcgcccctcatcatcatcagcagagcttcgcagctcttcttctcgttctgcacgcacgaagcgtaccgctgccatcgctggccgcacggtagccacgtatcgcgccgctcggtcgccgtctttcgacgccgcctccgttctcattaactgcattacttcgttcatcatattgccggccgaccacgacgcgcagcacgtcgtccgccccctctcattcatctcatcatcatcattgtcgacgtcggaggattcctccttcgtctcgtcatcatcgttcggctcgtcatcgttcgtgggcagctcgctcgccgtcaccacacggactcgtcctcggatctggccatcggcccttcgtgacgccgccatccgctcgccatccacagcaacttgctctggcgccgccgtcacaatcagacttcgcccgccctcatcattcgtcctcgttctcattcgctggggatgatcagggttgcgcggacgtcgtaaccccactacgtcgcccgctcgttgttttccgacaccgttaccgtgccacgcgtctgcaagtacgcgtcgttcttggctttcgcctcctcattcgtacagtttcgtgcgtagtgcccgttttggttgcacgcatagcactttggacccgtggggtattgctgcgcccaatgacccgactttccacacaggtagcaagtggtgccacttgcctggccaacgctgcttgcaccattaccgctaacaacacgccgtcgctcgtcagctgcacggctgttgccgcgtccgtcgttcgcaccggcctgctttaccgcggccttcaccttcttccgtcgtggctcagactcctcgccgctcgacaccgtcgccttcgccttgccagccgacttcttcgactccgtgtggccgctcgctgtcacagatgacttcctcgccaccttcctcggcttgtaccaatacttcccgttccacacgtgtccgggtggcggatcccacgtgcccgagtacgcgttgtacacgccttgagggttcgtgaacagggccacctgttcgacctccgactgcatcatcacatcgctgccactgccgaccatctccgcgggcaatccggtcccgctgatgcccggaatcacgtttgtgttgcccattgttccgctcatcgggatcacgtatcggctcggcgttgtcgcccacgcctggccgatattgatcataccttgcgcgacgttatccatcgggtcgtcgatctctgtccctttgtcgaccgcctcttccagcgtccgcggtttcggatgctgtttcacgagcttcttcgtcgtcttatccagacatctgtagaactgagccagcagcactctctcgctgaccttgttcccgcccaccacgtctcgtaggctagctgcgaagtcagcatgtgtctcgccaggcatcatgcgtcgcatgctgactcgccactctgccgcagacttatccagcttctcgccgtagcgccgcaccagggccttcttcaagttggtccacgttctcttccgttccgtcgtccgtctatccatatcgacccaccatttggccgcattttccatcggtttgtttcccaagatgaagtacagggccttgtcggaccacctgccgcgtccagactcttccgcgcccttcagtgcaaggtcaacacggtcgatccatgtcgacacagacacctttggtgagggggtgaatgtcggcagttccagatccttcacgttcttgcgacgtgaccgccgtccgtgccgtcgccgtccgtgctctcggtaacgctctcgccgacgtcgtccacgccgtccgcgcgtctatgaccctgtcgtccacctgagtcatcgctggagtcgtaatcggagctctccgagctgctggagccgtacccgaagctgtcctccgagtcgtcgctgctctctgactcgctgttgctctcaacacgtcgtcgtccaccacggggccgccacccttcgccactcgagctgtcggagctgcagtcgctcccatccgaaggcggaggtccacccccagctgcccgatgttgttcgctgcgtcctccgtcacctcgttgcccaggttgcattggagctgaagccccagcatcagacaccggttgttcgttgcctggaggtgctggtggttgctgctgcatgtcgcccgtcgccgccgtctgcgccggcgtcaccatcatcgtcaattgctgcaaggcggcagctacagtcgcccagttcgccgtcggacttggctcctgcctcgccgtcctactcaacgcagcttgtaggccttcgagtcggcctgagagctcgtggatcgcagccgtcaccgcgttccagtcgctcatcgtcgtcgtagtcgtcgtagtcgttcccggcgttcccgtactcgtcgtcgctggtgccgtgtgtctcgtcggctccgtcgtgcccacactcgtcgctggagctgacggctgctgcacgtgtccagccgtctcgcccgctggtgccgtccgcgtctcaccgtcgtcgtcgcgtcaggctgaagtcatctccgccgccacgtgttcgtcgttccgtccatcggctctcggcgtgctcactggtggctgcatggtcgccatcagcgtcgtgagctggtgcagcgtcgctgcgatcgcgtccatttccgtcgtcctctccgtcgtttcctcgttcgtgggtgccggctcgtcacctggaggggaatccgccgtctgcgattcttcggcagcaggcggtggatccagatccagcgacactggctcctgccgcgccattacggccgactccttctcctcctcgtcgatgggatcattgcgtagctgacttggccgcgcctttccacgtccagcgttgccgaagccctgtcgagcgcccgtctcgccaccgctcgactcatcaccatcgtcttcaaaatatttcgcctttgacttcagtctggacttgcccgacttgttcgacgtcttcgtgttcgccggagacatcggcgtcatggccctcgtcaggacacccgtagcttcgttcatagttgtagaagtaggcccctgtatgaccaccatgaagcaggccagttatcttgctcggctttttgagcaagtcgtatagctgcgctgcgtcggtcctacttctcgtcgctgcaactctaacaccttctggccgacagcgacacttcgtcactgcgcccgatcgtccacctcagtgcgtccgaccgaatttattaagggggttgttaaacctcttctatcacgcaagctaatgtcaacctcttgtcaacactaacctacgatcacgttctcgttttccacgcagggttcccggctccgaccagtcactccgcgcttccgtcaactcctcgttcgtctgcctctccctcgttcgtgtagagctctcgctccgtgtgctgcgtgcctcgtgagcctgatcgcgttcgtcttgcgtcttgcggcgcaattctcgtagtgagcggtctccgctcgctgctcgggccctccagccccgtccttcaacgtcgactcgacacaagctgctgcgtgcagctcggtcgtgcccttcaccgtgccactcttcgttattgtggccactcaggagctgtccgcagcttccgtccctacctcttggaccgctcccgtgccgcccatcgtcatgctgtagcccagcgaggacgtctgcttctcgtcgccctgcgtcagcgtctccgccgcctcgtgatcgtcctccgctgcctgctgctgcagatgggtccccctcgttggcccacctgtttcaaggccatagtaccactgatttgtcccgacacccccacattcgctgagtttaccaaagcatcctcctccaggatgacattgtgtgcaaccttcacgacgcgctcgaaggccatgctagagtattgtcgccaacagacgtggtcacgccactgacgagtcggtagctgcggcgtcgttaatccgtaatagaccttgctgtctctgctttcttgccaagactcctcttcacctccatagtcacaaaacaagcctccttgtacacagtccaaggcagattccattcaattacaccgaccgaggtaactatacgaccaaggtatttacgttggccaaggtaactgtatgctggtcgagctaaatacggcaactgaggtagctacgccgactgaggtattttatgctgaccgatgtaattatgctggtcgaggtagaaactgaccgtgactcaagtcagaaatacacgtctcacgacactggaatcccccagcttgaggcatcaacttgggagcaacgcactgtgtattttttgaaaagacatggttgatgattacccggcggcgtagccgtcggggaatctgtttttccagatcgacgagtttttacacggctcgagaatcagtaatctcgagccacaacagcgcgcacagtcgctcagtttgattttagcctagaactaacgtcgtcgaacctcagactatccgccttcgcttcacggatgacctctccgcgtttcttctatctcaagccgcacacgctcgacacggcgggtttcgcgtacggctcaggacagccctcggacgaccaagacgtggaagtccatcgcgttgcgagcgggcgctggagtgaactgaacgcctactcggtagcgctgcccctggcctctgtaagccgacgaggatggcgcgtgaagaagcccagggtggcctcggaacgtacgtcgggagctgtgtctgcatcgcgcatcgttgggatggtggagcagaaagatggacatatggtgtggtgaccggctaccgctgcagctctgactcgaatcggtgcgtccttcacgtcgcctcctctgccggcaacttcgattttgtctacgacaaggagctgttgcaggatttagcggtcgagacgtatgcgatgcgcctgtgcgaggggcagtctacgctctctacgatgcccgcggagatgcgggcgattcatgaggcagcctactcagcgttccatgcccgtgggcggggagcactacgctcgctcgaagcaatctgtaacaagatcggagtggctgctgtcgaagaaaccggtgtggtgccagtgttcgacatcagtagtatgcaagtggcccaagtctctgcgaagcatgtgctcgattttgtattctatcatgatggaaaccgccgaccgcccccttccgtcaagcttggagactctatttttgatgatccggctggccaagcaccggccgcgacagcaacggctcgcgtcagttcgactccggcagtcactactggggcagacccgctacaagactccgacgatgatagcgacaacagcgtggaagaaataggggaggcggcggtgccgagccagaccagagcctcgacgaagcgtggccgcgagggcgacttgacagatttcggtctacaggcgcacgctcgaccgcgcctccgtgacgatgaagcctcctccgcgcagctactcctggatggtgtacctggtgagactggtggaaaaggtcaatttcgggcgtcgcgtctccagaacacggtgcatcaagccattgtcaacggtacgtactcctacatgagttcttgttgagcacgtgcaggcccagatcgaactgctagcgttcctcccccaccctgccgtgctaaaaggcttcttcgcgtgggagttcgggactcgtggactctcgctcctgcactttgggcggatcgatgcaacgtgccgacgtcagctgcttgccaagtacgacatgtgcgacttttcaagcagcaatgaactaccacgacctgtagcagcgaagtcgctggacgacattttggctgcgttggacgtactggctgtattagtcgaagaagtgtaccagcccttcgtcggaggtgtcatcaaggcggcacggaaattcttcctcctccagaaaacatttcgctgcactaccgacgaggaggagctcgtagatctggtgttctggatggacgaacgcctggaaaggtccgcacatgcgtggtgttgggctctactgcacggtgcagtgccattcaggacgaattcaatgttgcacacgagtcgtttgtccaagtccagaacatcatccacgaacggcgccttgggtctctgcaggcttcagcggcaacaacgagcctgccaccccgcggccgtaacaagcaggaagacagcttctcgtcccgaacaggagcagcagccaagcgggtcccggagtttgtcctcaacgcgttgcccatcgcccaaggcaggaagttgtgcatgcggtacttgtccaaccagggttgtcggtcaacgggcccccagtgcacgtttgcgggacgcggccactttcggcctcaacacctctcggcgacggtgcgcgagttcatcgagtcgcgttatggggggttaaagcccgagtttaaggacctgtgaaggcgccactgcgaatggcgagagggctgttcgcgggctggtgttggtttgcctcttgacgctgctcaggctagacctaccttggtaccggtgtcggacagtacacagctactcgccgctacggcagtacgcgcccccagcactcgaagtatctcgctaatagaagctactgccatgtcggtctccgcttctctgagcaaaactactgccacttcggtctctgctcccaccctgagcgacgcgcctgccacttcggctgcgtctaccctgaacggagctcctaccactttggtctctgcttctcttctgacatggtcgggacggaatactacgccgccaatagcgagtgtgcggacgctgccaatagctccgctcgttccaaatctgggcccgatgccacaggcggcgcggctactgtcgctgcccgcacggtcgccgcactcgttttctccccacttgtctcgcggccagcgaccgcaggtgccgcagcccaggccatcgaccgccgttcactgactcggccggagtcagtgaacggcggtcactcgacgtgccgttggcaacatgggccggcagggaaccataccggcgagaaacccgatcggacaccagtgtgttcgcatagcacggtgttgacagccgttgcaggaatgtttgcccggcgcgtggcgtccacttcctcgacgctacctgcgcccgcacagccgggcttcgcaccataggcggtcgggttgcctccgtggagagtggcggccgtccatgggccagatttggcagccgaccgaggtccgaggaaggggaagatggctgtaccggtgtgactggtggtcctcgcgtaacttggggagtcgacacgggcggacggacgcctgctacggattccggttgcagactcggtgtggctcgcgcaccttcctagcggatttagatcgggcgcgggctagagaccttcaagagcgcattcaacggatccaacgacgaagagacgccggtgctcaccgtctccacagcgagttggaacgctgggggatttcaattcccgagccacattcgcggacttcaacggcgcggggttcgctccggtatcggcttgaccacaacaagcaggccgcatacagcgcctatctgcgccgctccgggacgcgtcttcctgacttcatccggcttttacgcggcgaagatgcttcagacctgagccccaacaaagcccttcaagtgccggaccacaagccccgttggggatcttatcggtttgcggaccagtggcgcgatgtggttcacgaaggcgttgttccccgatggaaggacggcttcccctcgcaggataccccgccgccaaaccatggctccgcccgccggtctctcaatgccttgatcaagatgaagatcgctaccttgtgctggacatcgacctccttggtcatctcgacggtatcttctgcagcccttttggggctgtcccgaagggcgataagccgctcagcgaagatgcccgtgtgattcacgatttatcctttcctgcccatggctccgttaacgagtttactgttcctgagaccgagattgcagtccactacgacggggggcgcgcgatcgcagcccgtattgaagaagttgagacgcactacccgggtctagcgcggctgatgtctgggaatgtgagcggcgcgttccggcatatcccgctgcatgccgaccactgcggccgttttgctggtacaatcccggagcttggtgttctcatcgtggatttatgctgcccgtttgggtggcggaactccccagccgcgtatgctatcgctggaggtgccattaaccacttgtactcgacgtcgaagcccctgtggcctctccaaccagcgcacgggaccggggaattcgacggcaaagtgtggtgtgacgaccacaactgcgcggagtcctgctgtcggcactcggctggaggaagcggcgacggagctccgcgcagcgatggttgctgtcttgggaccgtccgcctgtaacgaagacaaatttacggcgtgggtgactcgggggtcggcgctcggcctcgactgggatctccagcggcgcacagtttcgatgccccaagcgaagattgagaaggcgaggcagcgcgtgtgtgacttactgcaccgtacccgggcgtcacgatcgcaactcaaccgtgttatcggttctctccgtcatgtcgccacctgcgtgcgcccagcagcgccattctttcagcggttagctgacgcgcagcgccgcacccctcatgttggctgttttccgttggctgagtctgcgttggatgatctccgatggtttcgggccattctgtctgcctcccatttcaactccattccgctggcgcggtttactcgttcgcagccgcccagtgtcgaggtgcttatggacgcgagcgacgttggactctgcgcccttctccctgcccgtcgcgaatatattcaagttcgctttgacgcggaagagcgggcggccatccacgagcaaaagcacggtggcgctttcacgttcggcatcaatattcgcgaattaatgagtgccgtcttcgcagcgatcacgtgggggcacctgtggaccgccagcgatgatggagcggacgtccacgttcgcctgcgcattgacaatacatctgcgctggcctggagcaataagcgtgcggttcgggacaatccctacgcgcaaatgctgctccggcttatcgcgctgctcgaagtgcggcacgggttttacctgtccgcggagcacattccggggtcggaaaatgtgatggcagacgctggcagtcgcagctgggagtcacgggcgaaggcggcggcgtttactaacctttgtgttggttggtcgcaggttacagtccctccgagctcgcgcaaactctcgcaggtctgggcgcgctgctctgcgcgggagctttagcgacatccactagccgtgcttattcacgtgcgtggcggcaatgggaatcctggtgcagctttatgcagtactcgccgtggttacctcaagatggatcagttacatccacggctcagcttggagctttcgccgtcttcttatggaaatttggtattagccgtaagctcatcggcaattcgtatggcaccatttgctcgaagctatgtgcggtccggtggcgtcatcggtttgaacgcgggtatgaccccagtgtcactgctcagtatgcgcttctgctccgcgggatccgccgtttcaccagcccgtactcaagcaacagcctctttcgccaagcctcctccgtcggatttactctcaactcgacatccgccgcccgtctaaccaactactgtgggggtggtctgttgctggcgtacttctttttgctgcgcaggtccgagtatctgttcatcggaagggagtatcacccgttcgtcctccgcttaggtgatattcgattttgcgacagcgatggcaagccgtcaagtcgcgctgtgctacaattgtcggcattctcctccggggcgccaagaacaatcagttcggaagagaggaatttcgattccaacacgcctcaccagatgccttactgttgcccagtgcgcgcagcacggtggatcaagaatgctgcaagacgaataggaacaaggcatgacgaaccagctcttaagatggggaagtcaggcggagtttcgtcaagccaagtagcaaggataatcaaggccgcggcgtccaaggaaggtctcgatcctgcgcggttctctactcactcggtacgcatcggtggcgcgaccaagttgctcaatgctggggcggacagactggtgattaagctgcttgggcgctggatgtcctcctgcttcgaggactatcctgtgctgacctcggaaggaacagcaggtctgtcaagcctgatgtgccagtaagcgtcgcgaaggaattctcaaggtggggcgcctccacgccactccctggcacgagcggcaatacactacggtgattcccccacgagaagatctttggaaatggttgattacccggcggcgtagccgtcggggaatctgtttttccagatcgacgagtttttacacacacggttcgagaaccagtaatctcgagccaaaggaacgcggccacagtcgctcagtttgattttagcctagaactaaccctccagccactcccaggcacgagcggcaacactctacggtgattcccccacgagaatatctttggaaaataatacttggtgcgatgaaatcggtttatgcgttactgtacaagagggatatctttggctcactaatgagcttccagatggtatcgccacatgcagcgaagtaatactttaaatcatgtgtttcttgcatgacctaacatgacctgacctgtcaatgacctgtttcgcgctcttactttgtatcaactaccagccacacactcgcggtggcttcgccatcttcactaaattccgccaggcacgtgtgctgctcgatcccctgaaggcttttcagtggcgcaaaagctgaagtcgatgatgcgaactccctacaagaggccccatgtaatgcaagaaaatgaagctgacgggccagaatctgcagggtcaagaagagaaggagaaacatgagatggagagacagatcgtcaagctcttctgtgggatcgtgggtgcgcgcggttcgttcccgatcgaaatcgacgtggagctagcggtggggcacctgaagaacgagatcaaaaaggcgaggccgaacgcgtgcagggacaccgacgccgaccaactgcggctttttgtaccaaggagggcggtgaatggcttacggaagcccaactcgtggagggtctggatgcagatgtaaccagccgcatgaaggaattacgctttgcgcaggagcccatcggcgcgatcgtcgcatcaagacaacgcagcaggctcacttctcctagacttctcctagaaagatgttggagaaagttaagggcccgtagatatgctggtggttctggagagagcaactggtgggacgatcggctcggtggaagagtgtaagagaaggctccagacgtggttccgcgatgtccttgatgaacgcgacgagaagacgtccgatctgaatcccggagtgattgaattgtccatttagatcaagcggtgaatccgaagtacgcactcgagacaccagatctccttccggcgtataatacagcggtgtttcacttaccaaacaaatatattatcaaacttttgaattattcacactccacaccccgcagtacgcatacagatatgttgccgactacactcacacgaagggccttaccattgcaatctttgcctagagtgcccttgataggatcgcacgaccaccgtttccagcacgtgccgacatggtaggcgcgctactcacgttagcaccaggccgactcagcactaccgaggctggaacgggtccagcccaggaccccaagagcggcgcacctttcacaggggcagcgttcttgatctgggaagtgttcttggtgggagtggcgttcttggtacgcgccttgttcttcgggagcgtgcccttggttgccttcaccggtgctgggggtggaatttttacggcctccgatgcctgtttcttcttggcggcctggatctggccttgggtggcgttcttcgcaggctgctccttccggcgttcggcctccttctgggaattcacactcttctcaatggaattcgagcgagggcgtgcgttcctcgtctgcagagcgggcttatccttgcggccatcccacgcgccaccgatctgcttgagctgcgtacgaatggcgtcgtacaggtgctgaccgccgagttgcagcatggcctcctggaacttgtcggactgggcttgcttcaccatgtgcttcagcttgtactggttcaccttgctccaatccgcggcgttcgtcttaccggagatcggtttcaatcccttggcggtcggtgccagctctagccgctcgttgttgtcgaggctaaggatctcgcgcagggtctggcacgccgcacgcttctcgggcgccaagcccagcaccaaccgcagcacaaaactggcaccgacagagtactggccaagcagcttcgactgctgcgccttggtgttgttgcgcggagaggtggcagtcttggcattggtggccttcagtcgcgatgcggcgttggtcattcttgggcggtgctcggggagcgcggaggctcgcgtggcttggttgttgttgcttgttggcttgttggacgattgcaaagtgagaccttcaggggaccctcgccatgcagctcgagctagtgttgatggtttccaggtatcttcataattgaaaacctcgatatcttacctaggtttggcagcaggtgaagccgtgcagcagtagtgcttgacaaactaagataccgaagcgtgggcatatgcgtatgtggtatagcataaacgaagtttcatgcatgatcgactcgtgtgtagtaagtttgtggagagagcggaagatggcagcttatgagctcgcgttgggatattcaggttttgattgatgacgcaaaaccgagaagcgaagacgtaacgataattgaagctctgcctcctgccatcctgtttgaagactcttcaatgaagagccctcacaatgccaacagtacttccctttatgcaaacgggtcggacatttcgtagctaagctaccggtagtacggtggtagcaacactcttcgtcagttgagagctgcagtcctggttcagccgttgtacccaacgtggcccttttggcttcgatggtggactgggattcctctgtccgtcaaccacactcgatacgtcctgaaaacttggggtatggcgcgggttgtaaaggcaccgaagtggtgcgaaaaaaggcaacttcaacaggtaatacaactcatgtagccatgttgactacgaataggtatctttggtcattctgcctatcgatggttctaaggcagtgggatggactgagcgctgtggaagacgttccatgggtcgtattgggccttgatctggcgcaggcgcgcgaagttgtcggcgccccagtagcgtcggccgaagtcggcgcccaggtccaggtcgcagtagttctggtagttgccgccgtcgaagtacttctcgagggcgccggcgatgccgcggatccagttgtaggacggggagtcctcggactcgcccttgttggcgcccacgccgatctgcacggaccagacggcatcacggtgcgcccacggagtcatgtcgttcttctgcgaggcgaagacgccgccgtacgcctcgaattggatgtacgcccacgtggtgttgggcaggctgtcggcccagtccagcacagtctgcacgccctcgtcgtccagcgccgagttggagtagccgcccttgatcttgctgtagtccttgtcggccgacgtcaggtggtgcgagacgttgagcgagctcaggtcgtcgcacgtgcccttccagacgtacgccttggtggcgagctgtgagcagttgtcgcggcggtcgatagtcttcaagccgccgtggtcgaacagacccgacgagttgagcagcacgtccagctccgccttggagcccaggtactggccggtcatgcgcgcgcctccgccgtccaccacgagctgcgtggtcaccctcgagtcggccgtagggaagtagtccatccacgcgcgcaacacctgcgcacgcacggagacgttgaactgcatgctgaagaccgtcacaaccggcatcttgtacgccttgatggtgaagagcgtgacaatgccgaacgagccggcaccgccaccgcgcagcgcccagaacaggtccgggttctgcgtagtggacgcggtgacaaccgtgccgttgtagagcaccacccgcatctcggtggtctggtcagccgcgagtccgtagtggcggctcaccatgccgtagcctccgccgctgatgtgaccgccgatgccgacgctagggcacgtgccggcgttgaagttgtagcctccgagccggtccagctccgtgtagacccaggccaaacgagcacccgcctgtatcgtggccagaacggagccctcctccttgttctcggacacaaggttgacgtccaccatgtcggcgatgtcgatgaccagcgagccgtccatggacgacagcacttcgtacgagtggccgccgctgcgaggcacgggtgccaggccgctctgcaccgagcacttgacggcgcgcaccacgtcctcttccgacgaggcaaagtacacacccaggggcttgcggtcgatacgcgccttggggcccgtcgcgtagtcttcgtacagcggcgactccgacatgaagaagttggtgttggcagtcagcgtgccgttgccactgctgctgttggtggcgcatttgtccatgcagtcctcgaacgcttggagcaaagtcgagtctgtcgattcggactgcgtcactcgcgccaaggcacccgtggcagcaagtgccgctgtgaagagcgccgcggcttgatagaggcagaccatcgtctggaccgggatggggacttgacggtggcgtggcagattccggaatgaacgccacacgtgcggtgtacaaccgctggaacggcccatagctaccgaacaacccgctggctgttggagacgtctcatgaatctagtcagactgaccagcggaaagccgggatattagcatccatgcacacttgatccgcgttgatggcaaaagtctgccggtgcccacgctttggcaaagctttggcaagtttttgcatctgctttgttgaattaccaactaagatggggctaggttatcggagtagattagcaggcccctcgtagggaattaggaccaagaattgctagtccgatggaagcacttgcataggtcctacaaacagccgaaagcccgaatgtcgcccattctcacggcattcggggtttgaggtcttaccaaggactcctgtcaagtcttgtggcaggactttcatacgagctgactctaatacggtgtatgtcagacgcagaataaacctaggtaagcacgatgcggtcgatacattaaacaaccaagtcttctcccttcgccttcgtgggttccagcactgattgcttccccaaacaaagcttgcttggcttggacgtccattgaacggagagcctccgggagaccgctaatcggactcgtccgagatttgcatctcagatttagagacccccaacctcagattaactgacctccaaagtcctacgtaggactcggcaaaatgaccgaaaggcacaatatgataaatccttggccaatccttagtgtaagcaagcttcgatcacgcgatgtggattgcgggacgatctcaatgcaatgctccatggtagaaatacagtacagactagagcgtgagaacgagacgggtagcaactaatacccgtttctaccgatgagatcaggtattagagtcaatgtaaaatacataatgtggtgtctgccagatatgattcccttttaaatccggatatatcaggcgtctcgttctcacgctctagtctgtatacaaatctactcacgtaaatgctgttcggggcaattcctacaagctcggcccagcgtagcccggggacccaacagcaaagcccgatgtgcatccggcgaagcgtctcgccatcagtgaacccaccgcaagcggacgttgcgggccatgcacgtgcctgtccgcagcgacagcttcgcttacatgtccagtatccgtgcaaccgcctgctagcgatgaaaacagcagcgagaggcggctggtgagaagggctcctcggcccgcaatggggacgagtcatggaccaggccctggtggctgcagcggccattaccgtatgcagccatcaggtgccggctctgcccttccaagtgcaaacagcacgcgtgccgtgcatattttaatcaaggccgcgccgagatgatcatcgttagtgtgcggctgaccgacacctcttcagagaccctatggcttcgataatgcacttggattccaaagtacatatcgaagccaaaagggacacgttggctgaatcaggactgtagttatcccatctcaaataatacaacgtagctacgaactgtacatgtaagattgagctctgcgtttgcattactacgggcccttcaattctggccgggacaataaggtaagaaaatggaaagccatgttttcattgtaaaggtctgtgtgaaggctcttcaatcaggatgacaagaggcagggcttcaactaacgttacctcttcactacaaccagcaggcactacatgtaacttacacgtacgctgtaccaggcttcatttccttagtgttgtgctgataaacacaccacggtaactcatgaagcgagacctggaaagggcgctctgagcaaggcatgacgtgcgttcgccagcttccgctgtccccaaacccaatcgagttgagtaagggacgttgaaagttgaaattaatcagcacggaccaatgtgagcaactaagaacaagtccacgccactaagggtatgtgacgcaaaaaataatgtcgtaagtattcggggcgtatcgatcagcacaatccaaacccacccgagcccacgtggcttcgataccatgctgcgtcgttcgtaacttataacccaacgactgaatcaggactgtagttatcccatttcaagcgcaacggagctaactctaggaagatcgagttgaactgcgagcggcccgcttacatcaaaagccccaactggtgagaaagttcttcgatactaacgtacatacagccaggaggagagctgtgtgctccaatttctcggtttcgtgttgatagactaaaaaagtgtttgaaacgacggcagctccagagggcactggaaagggcggctcgagcgcatgatatcccagtgagcccgctctccacaacccccatcttacgtacgacagctcagccaaggacttgatcgcgagctgagcagctcagctggtggcaggattgtaacttgatactgtcctgccaccagcactccagtcagcacggcttcagttgatataatatcctgccgaggacacttaggcctagtgcgcgccgtggtgccatgccatccaatagggctaggtaccgaatttgcgtggcactccgtttccgaatgaaatggcttgcgccatggcaagataaactggtgatatacaaacacagtttagcaccccgtcggccaaaagcgggttatatgggttcctaataggtggacaaactagtcaaggccgcgtttgcgcgacaagcatacgacattgcggggccgcaggacccgccccggcctctgaatttattaacttgctgcactactcgcagtgctaacactgcgagtagtgcagcgagccgacgaggcgagcggaacgggtgcaaggaacaactaagcttaactacaatataaattctatccgccgcgtagcggcggcgctcggcttgtataccagcagagcaaagtctgatgtccgtcacgagcaatttccccattatggcacatggcacgaccaattgccatggcaccaaagcgtgccatgcatggcactagcatggcaccagtgacctaaacccgaggagctctcggatgacatggcatggcatggcacggatggcacgcggttggaactaggccttaaacggtgaatggcggcaggttgttcaaaagacccccccctcacaacacatgatgtgcccttgcttcggcatctgtaaagtgctcgaactcgcctgctgtcatacctaggtaagatatcgaggttttcaattatgaagatacctggaaaccatcaacactagctcgagctgcatggcgagggtcccctgaaggtctcactttgcaatcgtccaacaagccaacaagcaacaacaaccaagccacgcgagcctccgcactccccgagcaccgcccaagaatgaccaacgccgcatcgcgactgaaggccactaatgccaagactgccacctctccgcgcaacaacaccaaggcgcagcagtcgaagctgcttggccagtactctgtcggtgctagttttgtgctgcggttggtgctgggcttggcgcccgagaagcgtgcggcgtgccagaccctgcgcgagatccttagcctcgacaacaacgagcggctagagctggcaccgaccgccaagggattgaaaccgatctccggtaagacgaacgccgcggattggagcaaggtgaaccagtacaagctgaagcacatggtgaagcaagcccagtccgacaagttccaggaggccatgctgcaactcggcggtcagcacctgtacgacgccattcgtacgcagctcaagcagatcggtggcgcgtgggatggccgcaaggataagcccgctctgcagacgaggaacgcacgccctcgctcgaattccattgagaagagtgtgaattcccagaaggaggccgaacgccggaaggagcagcctgcgaagaacgccacccaaggccagatccaggccgccaagaagaaacaggcatcggaggccgtaaaaattccacccccagcaccggtgaaggcaaccaagggcacgctcccgaagaacaaggcgcgtaccaagaacgccactcccaccaagaacacttcccagatcaagaacgctgcccctgtgaaaggtgcgccgctcttggggtcctgggctggacccgttccagcctcggtagtgctgagtcggcctggtgctaacgtgagtagcgcgcctaccatgtcggcacgtgctggaaacggtggtcgtgcgatcctatcaagggcactctaggcaaagattgcaatggtaaggcccttcgtgtgagtgtagtcggcaacatatctgtatgcgtactgcggggtgtagagtgtgaataattcaaaagtttgataatatatttgtttggtaagtgaaacaccgctgtattatacgccggaaggagatctggtgtctcgagtacgtacttcggattcaccgcttgatctaaatggacaattcaatcactcccgggattcagatcggacgtcttctcgtcgcgttcatcaaggccatcgcggaaccacgtctggagccttctcttacactcttccaccgagccgatcgtcccaccagttgctctctccagaaccaccagcatatctacgggcccttaactttctccaatatctttctaggagaagtctaggagaagtgtgcctgctgcgttgtcttgatgcgacgattgcgccgatgggctcctgcgcaaagcgtaattccttcatgcggctggttacatctgcatccagaccctccacgagttgggcttccgtaagccattcaccgccctctttggtacaaaaagccgcagttggtcggcgtcggtgtccctgcacgcgttcggcctcgcctttttgatctcgttcttcaggtgccccaccgctagctccacgtcgatttcgatcgggaacgaaccgcgcgcacccacgatcccacagaagagcttgacgatctgtctctccatctcatgtttctccttctcttcttgaccctgcagattctggcccgtcagcttcattttcttgcattacatggggcctcttgtagggagttcgcatcatcgacttcagcttttgcgccactgaaaagccttcaggggatcgagcagcacacgtgcctggcggaatttagtgaagatggcgaggccaccgcgagtgtgaggctagccatccctacaccgagcccccctgacttcgatatcatgatacgccgttaccagtggtaacttttaacccaacggctgaatcaggactgtagctctctcatcggacgtagctgcaaactctacgacggccgagttgagttgtgtggagcggcccgtttgcaaagtgagaaatcccagaagcctcaactggtgagaaagctcttcgctacaaccagcaggagagccatgggctccattttctcggtttcatgttgataaacgaatgcaactacacctttgccaatccaagttggcagcagtgtaaagcaaaacggtgtgaagtaacttaagtaacatccaaaaatcggaaaataatttctgaaattagtatttagagcaatgtggatttctccctgtctccgccggcaacatgccccaagagccgaagcattggcttgcggcccgcacgcgtgtgctcgatgcacaccgagaagggcgtgactgggtgctggttgccgactgcaacggcatccctcccactactgcccgcaacatcgtcgagggcggtggaagggcgcttgggcgcatgatatcctagtgagcccttcacccgttcaccatcttccgctctccacaaacacaacttgattgacgcgtgttgtgtgtacatcttacgtatgatacgtccacaccataggcgaggacttgatcgcgagctgagcttatctccagcgagcaggacagtatcaagttgatactctcctgctatgagcgctgtgcttgaacggtggatgcagcccggcccagtgcatttttgtgaacggatttgccatgaaaccacgtcatgaaagttgcgctgagtaccatacacactgcatgtatgtccccacccccgcttgcaacagcattgggctctcgcccgacagcctaaagcagaaggagtacgtgttccatcgaacttacacgagagtcagcggtggtcagatcgcaggccaaaacgcgttggcactacgatcaaaccactcgagaatggatttcgtgccaaatcctttccagtcgtgttgaatcgacagaaggaagcgtgttcaccgaagcttcacctccaccgaggcgagcctcgcaatcgaccacgacgactggaccgagacgcgcgtggctagcgagaacaatgcgagattcaatccctcccggggccaattttcgcgtcgaggaacaattgctctctgcacccaacggaagctcgggcctgtcctgacagtggctggatgatagtcgcacttcaattcggccccacctcgctaaagacgaacgcttgacctgacccgcaccaccttttcctgcttggaagagtaccatgtgcttttgatgtcaaaacattgccttcggccgagcagcactggtcacaggtcactctgctcaataattgccgccgttacgctggacttgtgatcatgcgcacgcgtgaaaggctcaaatgcgcgccggttgtgtaatgctcagtagggcgccctttcaaagtttaccattgctgcggcgcagtaaaccttgcatcttgatccccgacgaccgtgagctcggtgatccacagacgcccgcagttagctaacatcttggtgctgtcaaatgcggcggcggcgctagagatacgagccgtgggccactcggtttgtttccagggatgccggcgtgctccttccagtccagtcggcgtccggcccgtgagagggccccacctgagccctcgaagactatctatccaccgtccgtcgccgaaagtgttcaactcgcggtcaccactttccattctgcgtgccaagtcgctacctggcagacaatttgacccccatcccgagcctcaagcatcaggctctgagactctgcgtggcgaaaatcaagcgagcaacgcgcgtaactggtttcgggtagagctgaaagccgagcgagacacggaccacacgaaaccgcagcgccaactagttgggggctgaaacggggggggatcaatcgaccaccagtcggcactcttgcaatcgcctcgtaccacacaggcaggaccaccatgaatggctccatgagctcattgacagcgaccatcacgtcggccttggcgctcaagccgtccacagtctacatcttgcgggttgaagacaccaagacgcggaggagttggcacatccgccgctgcttctccgagttctgcgaactgcgcgagaagctcctcgcactcatcgacgacgagatggccacgtacctcaccagcccggacatggacaacatcgagagcagcttcaacaccaggtccaacgtcagctcgagtgccagcgctggctccagtgtcagcacttgtaccagtatcaactcgcaccgcggaaggcatcgccagacgccgccgtccgaccgcttcgccttcgtgttcaagcagttcccgccgcgaaaactgtttggctcacgctccaagcgcgtgatcgaggcgcgatctctggcgctcaaccgcttcttgcagcaggctctggaggtcgtcgaagtcgttcgccagcgccaactcatcgccatttgcttcagcatgatgacccacatcgagacgttcctcgagtgtggaagccaccgagctgcggccccgcgcgtcgctccgtcacgaagtgtggactgcagcaatgtcaaacctgctcgacgaggacccgtgtcgcccggtgcagctaggaggacgtcggctgcggcgtcactcaccccgggattccaccactacccgttggtaccgactccagccttcgcgatgacggtgacggaccacaagtatcagtcctgcaccagcagatatcacctcagctccagcagcgaggaggatgcaggcggcagtgacgacgagactcagcgcttcaacaacttcgacttcacgcggaggttctaccgtgagttcggtcgccaggaagaacgcgcggagatttacgcggacgactcggacgacgacgaggagatgcagatgctcaagaagacatggagcgctatgctcgagagcgaaacacacgagcgcaaactgtaccacagcggcagtcacttcgccatgctggaaagcgcacagcactcaccgactgagacgtgggcgagacgcatcgagatcgcaggcatccacaacgcagtcaaatctaatgcaaccttgagcgccacctgcccagttagcacacagaaggcgcccgagccagcgactcacagagcagagcagctcctaagtcgccaccgatcacaccagcaacttccagtccagcacttccggacctgcgcttgagctaagtctgcgtacaaatactcgtgacgataagctagttagtgaattaggaagtgagtttgtgtgaatttccacgcacagcgccacggttgggaacggctggagtttcaggccatcgaaggaagtggccgccatcgttccccaacttggcgaaactatgaagtaggagagaagtaatctaacaggtcataagtaccattaatttgtcgacatgcccacactcgccgactttacagtggattccaaagcctcctcctccaggatcaccttgtgtgcaatctgcacgatgcgctcgaaggccacgtcagagtaccgtcgccagcagacgtggtcgcgccactgccgagttggaagctgcggcgtcgtcaatccgtgaaataccttggccacagcgtaactcgtccatttgataccttcatcgttgctcttgctctcttcagtatcactgccctcaagcggacctccaccgccaagacggagttgaatgagtgagcgtgtatcccgctcgatagcctcgatcagagactcggtcagcggccgcagcattttctgcagcaaacgctcatcctcgtcaccttcgacgtcgtctccaccggctgcagcatcatccttatcgtcgtcgtcttcgaagtaacgtaccagtttggtctcgagagcatgggccttattatccagatcttcttcgtcttcctcatcttcgccatcacgcgcggttgacgtcggagaaggcgccggtagagctgccgcgtacagcgctccatacaaatgagcgagacgagcaagctggcgcgactcgagatgctcgtgcttcgcgtacaacagcttcgtccatcggtccacgacttcactcttcatctcgtcggtcagttcagccctccagctcaactgcagctggaatgcgggctgtgacagcgaaaagcgctggatctgaccagtctgttgagccgctcgcaattcttgaagcagccgacgctcattcgtggcggcagcgaccgcagcagcattggtttcacccgcctgctgagcgtcggaagctgctaacagggctgcagcttggtctccattgctgttggcaccagtcgtccgtccgtaccattgagctacttcgtgcaggtggcagtcgataacccaagagctcagatacccgtccttacgatgtgtcacgcgtgcattaggcaattccttgcgctgcaccgctccgagcagtgacttaactgtagattgcggtcccagtttcttcgcttgagtgtccagcagctgcagtgtacattgactcatgctcagaggttggagtgtcacgcgtaaacccagctcgtcgtccttctgacgctgcgtctcgagggccagcaacgtgaggaacgtctcgatcgaagccgccttcaggtcaaggtggcgctccagccaatctcgctcgagagactccagcgtcaggtcactgccagctctctgacctcttcccgagcacttcacagccactacatgcttcttgctcgctggggataagctctcccgactctggaagacaagagccatgagcctccgaagctggtcgcgatgtaatgcggttgaaaacagtaacgagcggaagtgcaccgcgtcttcattcagcagatacagcaacgctcgcgcagacttgccgtcacgaccagctcgtccaatctgctgcacgtatccctcgacagacgacggcatgtggaagtgcacaacagcccgcacattcttcttgtcaatgcccataccaaatgcgatagtagccaccacaacgcgcactctgcctcgcgcaaaacctgtgcggaccttttccttcgcctcaggcgccatgccagcatgaaacgccaccacctttccagcagtgcgccaagcgttgggcaattgttcacgcagcagagctgcaagttcctccgtctgccgttgctggtgaacgtacacgataacaccaccgccagccttggaggactgtgatgatcctttgctcaactcggggaggatgtggatgagatgccgcagtcgctcatcattcgaccggacggaacgaacttccagcgccagattcttcctttgccatggcatctgcagcaccatgtcgctctcgctttcgccaccttgattctgaagctgccgacgtgagcgcaattgatgcaatacatcgtggacaacacgtcgcgaggctgtggcagtcacacacaaaacgcactgggcgtggcggaagacctctgccagccgcaagtagcttggacggaagtggtgggaccactctgagacgcaatgcgcttcgtcgacacacactagcgccatgcgcgcacggacccgcggcaacgcgagcagcgcttgcattccagcacccagcgccttctccggcgacaggaagatcagagagagtttgtccgccagcagatcacgcacaaaagccgcatgcttcgccttggacgagcctgaatccgagccggagccggaaagacacacggagcgagccttcaatggggcggggagactctcgtactggtcgttcatcagcgaaataagcggcgagatcacgagcgtaattccaggcaagaagagcgctgggaattgatagcacagcgacttgcctgcacccgtgggcaacacaaggagagtgtccttacgacgcagcacccttgagatcgcccactgctggccaggacgaaagtcagcgtgcccaaacaccaggcgcagattggtgagcattgcctctcgctgctcctctgcagtagcttcgatatccggaggaacgcactcaatggcctccgcttctgctgcggattcagcaacaccgccagaggaagaagaagccgtgaagagtgtctgcagtgcaagcgggacgtggtcgtcttcccagaggaagaagtcgcagcgaccttcatcgaatcccagcgggcaggcgaagaacttgcggccgtggttcttgttcttcttcttgacctccaagctctgacagaccaacgcatgatgacacctcggcggtgtcaatggctcggcctccttcttcggtttcgatttttcttgactagagagaccacgcgctttctcggctttggccagcgcttccagacactcctcggtgaagtccacgccgtcgtcagccagcatcgacttctccttcttactctgttgagtaccgttcgcattgaccaccggagcgaggcctgaagatttctcacctgtagcttcgtccagcaggttctcattacgtgcgcgcagatacgccggtcgcttcttggcgcgcccagagctgcccttgaatctcttacgcatgttcagcttgacgaagttgtcgctcaccgcactttgggcgtcctcggccttccagcgctcaaactccgcagccttccgagcatcacccacagcaccggaacccgcgtcgttgctgtcagatggagcgtcgaagtcatcgagagtgaacccactgttcccagccgtcgcgaagccccacgcctcctcttctttctcgtcatcactcggagcagccttacgtttgcccgacaccttcgtcacctccttgtctttatctgtctctgcatcaaccaccgacagccctaaagacgacgcattggcgcctgtatctccactggataaaacactgttgagctcctcctcgtcgcctcctttcttgtccttctgctgctccccgaagacctcctggaagacacgatcaaagcccgtctcttgacgttctctctcctgctgcttggcccgttccactgcttcatcttcaggcttcttagctgccccactgcgccacaattgctggcgctcctgtacagacatggagaggcctagtggacctccttttcgctcatttttcggcttcggctgcgtctttttcgccgctttttcgggctctgagggcttagtgaccttcttgcttgcatcaggcttgactttcttctttttcttcttgtctagagcccgtagcagccacgcagcgtcgtctgtgcctgaactagaggtcttttgagctttgacagtggggtttggggccttcccggcgctcctacgaggcgcaaatagaggtgcagatgtgcctgaagacgcagaagatggtggtgctcgagaggacaatggacgatctgctggagctgaggttgcagcgcttgaagccccaccaggagctgcctgcgccggctgccggcgcggccacattttcgttcgaaatggtccaaaaatggtggcgccaacacctgcgattggtcgaaaacattaacgtaacgcgtagcggcggcgctcggctagttggtccgccatcgttgtatattagtaactttatatttattaggatgaaaagcaaattaaaattgaagtcaataggatcttacgcgtggtgcagtcagtccacagcaggtgccatatcctcgtgctctctccacttcttctctatctctttgcgcttccactccatgcagtcgcaaaacaccttcttgttctgtacgtagatggatgttcgcatctccaagccatcatccgacacagcaaagccttctttcaaacgcagcgagagaagtcttgcgaatccagcattccacgcgcgcacaaccaaatcgacctatggcatcgtaaataatgttagaacaagtagtattcagcacgtactcaaactactcgtaccttgtatctgttgccgattacaaatccttcagatgtggactcgacggaaattttcatcgtcggcaccgcataggaccgagcatcaaaccactcgtgcatttctgcagaaagagcaagacgattgcttgggtcgttgtcatacttcttgtagcttggatatttcaggcaatgctctctggacatcacatggcagctctgtgccttccccaccgacccgaaccactcttcactctcgatacgctggtacttaaattcgtcagtcgctacgtcaacgatcgaggtgttggacgagaaagtcgtcattgagacttgaggggactcggtatcatctggaacataatgcatggcaaagatgcgtcgcagttcgcttaactcccgagaaactggggccacagtcgtcgagatcgtgtggccatcgagtggggaagtttgcttgataccttcggtctgcagttcgttttcaaatagcaaagcatccctctctgtacaacatctgtgagacatcaaccagcacagttctacaataaccaaaatgcataccttctttgaaaagaacatggatccgcaacatcacctcatcataccacagcgccttgtcggtttcgccagcacgaaggttgggatcgtagtatccaaggaatgaccccgccagtcggtacagcctgcagcgaatccctttcgtgttcagcgcgttgccaacggatccagtgacaagccacaattcagtttgtgcgtgttcttgctccggaagcatcaccagcacgtgaatcgttccgtcggagactgtgggaaacctctcgcagatcttgtccgttggatcgtccaattcctccttcatgtagtgactctcaacttcatcgggcatctcccccttccgcatccggagcagatccttcgacctcagccacgcgccgccctccgtcttcgccacgtagagcttcagcttgtctgcgtcgatgtccttgaagtcgttcgtcttctccgccttgatcgccttcttcaagtctccaaccgactggcccccatcgatgtccacagggaacgcgcttcccgccgcaccaacgatcgcacagaacagcttcaccatcttttctcgaggcggccgattctggaatgaggaaagggagggagggaattcgctacctagacccacacgggctttcagccaatcacaataatggtgtcgtagaaatggcggtgagggtgaactatccattgcggtaagaaaacctgggcatgattttctttcgaatgaactggggtgcgggtctctaagcggaggcaaacgccccgaacaattttgcgttttttacggctaggacacactgcgcctcagcagatatctgctgtctgcacttgttattgttattaccattatcaccactattttggtgagtactatgcctgtaacgcttcatatgactgcactagatattttaattctcatactagagatgctataagagcatatccggcggttggtctcaaacacggttataattgatgttgacaacatcatcatgttgctattggtattgattgcaactgccactgtcgccgccactgccagctactgcggctgctactgtcactgctactggacactgccactgtcactaccgctgctactgctactgctaccccattactacttctattgctatactactgaaattccactattgttaaagaaattgcttttgatattgctaactgtggtgggcgttactactggtcactgttactaagtactgtttatccctactgcaactacagcaactaaaactactatttcactattgttaatgatatcatagtaatgctgtcattgaagttgctagttcatatctcctgctatcgctactgcgactgtttattatctgctgccactgctggcactgccgttaccgctgttatttgcgctacaactacgatatcagctatgataatgacatttcaatgatatttcccctgctttcttcttcacgccggagaaagactgccaaaatccacttcatgtttctattatatattgctgcataatatcactggccatctcatggctggcgcaagctaaatttacaagtagatgccgtctgaacatcgccgtccccacaagcattaccgatgatcttaacttcttatcggtcgtctaggctttgtatatcactctctttttttctaaatattatatgtgacttgcattgctgcgtaagtaatatcaatacgaagtattaatatttcttattcagtaaaatgctattggaattgttcgcctgcgtcaagatcactgcccgctaccactgcaactgtcctactgtcaatgccaccgctactgcaaccgctattaaataatagctttgctactgatgttgttatcgctatttctgttattagcttttttctgctcgcccgacgaccaggaagaaaaactgtcaaggtctactccatggtgcgtgagttgttgcaactcagtatgatgtcatccaacgagactttttcgcgaaccgcacctgttaagatatctctatttacgaacgagcagtttacacgtcaccgcagttatgaagctaattccgctttgttatgcgttcatattgctctagttaggttcttgctgcagcaaacatcacgcccatctaatcgggcacatttaggattaaagtgcaccgcaatggccacgaaggtggcttgtccgtctatcaatgaatgtttcttctgtacctactgcagctcaatatgatgcgacgtccagaacactacatacactactgtcgcgccgtgcgcactccgtttagccaacgtcgcacagcgccgaagttcgcacagtatgttgcgtgtgaattaaaccgcgcattttttgcttaagttttattccaaccccgttaaaatcatcgatcgcgcttcgctgctttataccggtaataccatgatattttggatactctagttcatattaaaaagtaccgaatgtattaaactgatggtctgactaaaaatgatgctggctctaagctatccccctccacgacaaaaagatatggacaccaccaaaagtggctgtaactttgtcattttttatcgttttaaggtgcggtttggactagagttgcagaacacgctgataaagatctgcacgctgctaacacgcgcgcttttgcgcttcatcaggtagctcacatacaaatcactggttctgcccaggtgacaaaacttatggacagctgatccaggtagagtggagaaatcatgggttgctttgtctccccatacaaagtccaagttcgtatcatttgtaaggggttttggttaatataggattttgtatggggattagctgtccataagttttgtcacctgggcagaaccagtgatttgtatgtgagctacctgatgaagcgcaaaagcgcgcgtgttagcagcgtgcagatctttaccagcgtgttctgcaactctagtccaaaccgcactttaaaacgataaaaaatgacgaagttacagccacttttggaggtgtccatatctttttgtcgtggagtgtacgtgatcccattgttgctgtgtgcggtgctcggagttgtggatgagacctctttcgcacctggtgctactgtacttagcagtggtgtcgacgttttcagcagctgggggtcaggaaggtgcagagcagtgctcgtcggtaaattacggttagaaaaaaggacggagctaggtaccggagtacagactagagcgtgagaacgagacgcctgatatatccggatttaaaagggaatcatatgtgtcagacaccacgttatgtattttacattgatctaatacctgatctcatcggtaaaaacgggtattagttgttacccgtctcgttctcacgctctagtctgtattactacttctactctacaacagcgggactacgcagtcagagctccacagcctggagtgctttcaccgtcggcagctacgcaacgtactcaacatctgctaccctcaccacgtctccaatcaagacctctacgagatctgcaacgagcggccgctccgacaccggatcacggcgtccaagtggggcctctttggccactcctgcggcgccctgagatcccggcgtacgttcaaatggcggcctacttcgctccaagcgatgcagctaagtggcgcggccgaccgcgcacaacgttgcctctagtactggacgcagacctcgtttcaagtggctccggacaccgactgcgctgcgcgcgcgatcttgacgaacttcgacaactagcactggacaagacaagatggaagacactcatgacatcaatcctcgattcgctgcctgcagcgggagacccgacatctgcggacaccactctatgccgccgactagccaaattgagtctagcgcaggcataacttcggctacgcgaaaatgtatctcatttcatgtactttggaattcaagtgcattatcgaagccatagggtctctgagaggtgtctgtcagccacacactaacgatgatcgtctcggcgcggccttgattaaaatctgcacggcacgcgtgctgtttgcacttggaagggcagagccgacacctgctggctgcatacggtaatggccgctgcagccaccagggcctggtccaagactcgtccccattgcgggccgaggagcccttctcaccagccgcctctcgctgctgttttcatcgctagcaggcggttgtacggatactggacatgtaagcgaagctgtcgctgcggaaaggcacgtgcatggcccgcaacgtccgcttgcggtgggttcactgatgtcgggacgcttcgccggatgcggatcgggctttgctgttgggtccccgggctacgctgggtcgagcttgtaggaattgtcccgagcagcttttacgtgggtagatttgtacatgtatttctatcatgagatcgccccacaataaaaatcgcgtgatcgaagcttgcttacactaaggattggccaaggatttatcatacagaactctgcctgaataccgaacgcctgatatataagggctctaggtatataaagtgatctcaacgttaccacagaaaaggctgtactgaattagtttatcttagacgggatttgacgcttgcttagttaatcaaacccgagtaaagcagtgctgagctgtttcagcgctgaccttcgactaagtgtgttcgcaccacatcagtgcggttagtagctctactttatactactcgtagagggcttagcgggtagtgcgcaaatgtgaaagtggaatcgtaaatacagagaagatcgcacagacaatcaaaagggcgccaattttcaaactgcacagcttagtacttttagccaaacaaaggtatcctggatttttacatcagtacctttgctcatctccgttcgtgaccttgaagtattatttatatgaggttatgtattgtatacccgttcggttgaggcagatttctgtaatctcattagagcatctccaccggtcgtgagtaaaattaaattttaccccttttctgtcaatatttaagtatagttttagtttttggatgctccaccggtttgagtaaatgttaagcaaattgcacaattttttacgcagatcaaagttttgaccaaacttgcctacggttgagggcttgagtattttgttggtcaaacaccagccagctcaagtcagctctagatcaaaagccctagcgctctcttcatgtcgccctcctcccccgccatattgctctcatcctctcccctgtcttcaggaacgcaaacgtcttcagcaacggcgtcgcaaggcgcaatgccgtctctggacctcgcccagcgatctctcgctcccccacccactccattcgcgttaacgccgtccccgcacccagtagcaacgggaagcggcacagagtgtggcgacattggcctcagctctccaaaccctgatgggtgtgtgcttcacgatgtggcagggcgagaagacagcgagttaacgcacgcgctcgcgattgccaccgctaccaagaagaagggcaaaaacttcggccttgatgaggatctgaacctagccgccgcttggctggatgtttcccaagatcctattgctggtgacgagtaaacgagagaggtgttttggaagagcgtgcatgcagaatttttgtagcgcatgaagcgcgccaggagcagcgcgttgctagcagcttgcagactcgatggcgaaccctgcaagctacctgcaacaagtttgccggcttctacgccgcggtttttgtccgcaacgagagcggcaagagcatggatgacaagattctagatgctcatgtgctctatcgagcgcagaacaagagtgccttcaaacgtcaggctgtgtgggcgattctccagaactcccccaagtggtttgaatctttggcggacaagaagaccccccccccgtaagcgccgcagcacggcttctggatgcgatgcgtctgaggacgctacccccactgaacaatcagatacggagcgtcccgttggcagaaaatggagtagttgcatgtaggcgcggtcatgtttgcgagcccggcataccaaaaaacgcatgccagaaccctaaatcgtttgagaccaccgcctcgagcacaatggtcggcgtactctccttgcctgtgtaccgccctgcccacgccgtcggacagtttttccacggccagtgcatgcagtttaagctgccaagcatgcccacgaagccacgcaccccatgcatggctagcagccgattgacgtcgtctgcatttggcgcacgtagatactcctcgccgaacacctctagtaccgcagaacagaaccgcagcaagctcttgatagctgtgctttatcctatgcggacgtactcgtccaccgcatccgccggcataccgtaagcaagctgccggattgccgcagtgcacttttgcagcgctgtacagccccagctttcccgtcgcgtcagctcgctgctgaaagtagctagcatgttcctcaatagcggcgacgatccttaggtacagtggccatcgcattcgaaagcgtctgcgaaacgtacgggcactgtagacagagtcatcagcgaagtagtcttgcatcagagctcgcaatcagcgaaactcgggtacccgcacccacccggggtgcccggccagacgatttcgggtacccgcacccacccggcggtaaagcctaggatccccacccgagataaattatactccgggcggtgctacattctatcaacggtcaaagcgaagtaaatgaaagaagtggtatatctattatgaaaataaagctcgcgcacccgtgaattctggatgcgtgtccattaacccccccccagcgcgaagcggtttggttcccaccatctcacctattcctacaaacgttaaggtgtatcattatgatgggcatgcatactataatgtagtaatatactatcgtgtctctagcaaagtcggtgcacacccccacccccaactgagttatcgtggcttcaacgcgtaaaagtgtcttgaccaagacaagtttagatctatattgtgtctgttgtgcacatagtcggcacaaacaaaaggcgggacttgtccacgcatcgacgggaacagaacatatgtaaggtgtgcccgcggtagtatactaaaaacaggtcacgattcgagccagaaagcgactagctggcgtcatcgtcacggcgtgtactagtatgtacaattgatctggtgtgaccttccacagattgcccatccatgtctgggggcggacgacaaagccatacttcaaccatgtaccatacacaataaacatacatttagcgtgtaccagacacgataggataacttataccaacgagcgtgtctgatggaacgtatatgaagctcaaaacgcagtgtcctatcatggccacttatgctctagacaacgcttcatcaacgtattcacacatatgaaagcagaacaaagtatgcaatacaaaactagagtatccatgaaggtagtattgtattatagttggctttgttgctggcgcccaggacggtacttgcatcgctactcccattgtatcgacaatcctgcggctgcggtactaccggacgtgctcaggtgcgttatccgcctgtcggtttatcaatggaaggaacagacacgatatgcttagaataatagcgcgtccatacagcataaacggcacgcacctttggtcttttttgccgtacgtgggggttcgtcgtttactgggttagcatgatggccctcgcagtagcttcagcagtcatcgacaccatcgcgtttgcaagagaagcaactgtacaccgctacaagcacaacagcattagaaccgtagcatatgatacagcacaaacaatgttgctcacacctttgcctcatactgcagctgtggttggtacccaggtggtaggtacacttgtatgtccagcttcttgagctcgtctggcgaatgcgcttggaattcagggacctgcggggaagcggtgagattctcgaatgagcgagaaatgtgtggtgggctgaagcacctgcagcctcaaacactgatctgtgcttcccatcactacctatatcaaacgcacgactcgtgcacggcatcgcgggaaagatgaggtataaacctagcccttattgactccaagtttgtatgtgggcatacaaaaacaaagtataattcacttaacgtgtctggtacacgttaaggtttttgcctaatcgtgtctcatactggcgctcgcgttgggggggtttaatcggacctcacctttagcttcttcgtgtaccttatcaaccgtagagacttcatgtcgtatttttgggaggttatcggtctccatgcttggatgttgggtctggcgtcgtcaaatgcacataagcgtcgggatgcgaaaccttccacttatttttatccttactctcgggtacccgagcttcacccggagattgtttcgggtacccgcaccctacccgaactcgggtgtacccggttcgggtgggtaatttacccggttcgggtacccgattgcgtgctctgggcaccggcagacttttgccatcaacgcggatcacgtgcgcatggatgctaatataccggcttttccgctggtcagtctgactagattcatgagacgtctcaaacagcaagcgggttcttgtagctattggccgttccagcggttgtacaccgcacgtagcgttcgttcactcattccggattctgccacgccgccgtcaagtccccatcccggtccagacgatggtcttcctctatcaagccgcggcgctcttcacagcggcactcgccgccacgggttccttggcgcaagtgacgcagtccgaatcgacggactcgtcgtcgctgctccaggcgttcgaggactgcatggacaaatgcgccaccaatagcagcagtggcaacggcacgctgactgccaacactaacttcttcatgtcggagtcgccgctgtacgaagactacgcgacgggccccaaggcgcgtatcgaccgcaagcccctggggtgtactttgcctcgtcggaagaggacgtggtgcgcgccgtcaagtgctcggtgcagagcggcctggcacccgtgcctcgcagcggcggccactcgtacgaagtgctgtcgtccatggacggctcgctggtcatcgacatcgccgacatggtggacgtcaaccttgtgtccgagaacaaggaggagggctccgttctggccacgatacaggcgggtgctcgtttggcctgggtctacacggagctggaccggctcggaggctacaacttcaacgccggcacgtgccctagcgtcggcatcggcggtcacatcagcggcggaggctacggcatggtgagccgccactacggactcgcggctgaccagaccaccgagatgcgggtggtgctctacaacggcacggttgtcaccgcgtccactacgcagaacccggacctgttctgggcgctgcgcggtggcggtgccgactcgttcggcattgtcacgctcttcaccatcaaggcgtacaagatgccggttgtgacggtcttcagcatgcagttcaacgtctccgtgcgtgcgcaggtgttgcgcgcgtggatggactacttccctacggccgactcgagggtgaccacgcagctcgtcgtggacggcggaggcgcgcgcatgaccggccagtacctgggctccaaggcggagctggacgtgctgctcaactcgtcgggcctgttcgaccacggcggcttgaagactatcgaccgccgcgacaactgctcacagctcgccaccaaggcgtacgtctggaagggcacgtgcgacgacctgagctcgctcaacgtctcgcaccacctgacgtcggccgacaaggactacagcaagatcaagggcggctactccaactcggcgctggacgacgagggcgtgcagactgtgctggactgggccgacagcctgcccaacaccacgtgggcgtacatccaattcgaggcgtacggcggcgtcttcgcctcgcagaagaacgacatgactccgtgggcgcaccgtgatgccgtctggtccgtgcagatcggcgtgggcgccaacaagggcgagtccgaggactccccgtcctacaactggatccgcggcatcgccggcgccctcgagaagtacttcgacggcggcaactaccagaactactgcgacctggacctgggcgccgacttcggccgacactactggggcgccgacaacttcgcgcgtctgcgccagatcaaggcccaatacgacccatggaacgtcttccacagcgctcagtctatcccactgccttagacccatcgataggcagagatacctattcgtagtcaacatggctacatgagttgtattacctgttgaagttgcctttgagtgtagtcggcaacatatctgtatgcgtactgcggggtgtagagtgtgaatagttctaaagtttgataatatattttgtggcattggaaagtggcagtttccaacgctgttgacacaccagcccgacaatcaagttcaatcaaggggcaatcaaggcgaggtcaaggagagacggagatggctgcttctgattggatgacgacattatcctcggtggagtgacagtcagtggctgaagcctcgtcgggtcctaatagaaccccgaaggaggcttcacggtacccacgtttaggtacagatacatttagttacgtacttcggccgcacttattagtgtagccgcggtcgtcatttgatgtgtccggaatcgccttattgcgatcgttcacactagatatttgtatagggacataggactcatcataggatgaccagaacgaggccccaggggctcagaaaactcagtaataaaaagacagtcttcccccaaagccaacaagggtcaagtccgacttcggtaagtgtagctagcttattgtagtgcctggacacgctcggctgcgtgtggatgcctgtcggggagcttatcgtgcattgaccgagtgtttccttggcagcgccaagagttggcgcggccggagaggcagaaacggtattagagtatcgttcagtgtatatttgtgggatttgagtgttcctgagtttattagtgttcctgagtttattagtctaccagccgatgtttaccttggccccctgtataagggctaacacgccggtacccttcctttctgagggactgcggtgaggctgcgtgaaagcactgtatggtatcctagccttagctcgtggctagtggtacaggtttttgggttgaccgaagacaacctaaggtgcacagaggtgcttgcaaccgacccggtgtaagggatcgttcctggtcttctggttttgatccaataagcgcttacctttgcgggttagcgtgttgttggtgtctctaataccttttggtagaggaggattttagttgaattaccacaccacaactggtgccgcgacccgggattggtgtgaccttctgtgtgtcttggttgtagtaggtatttaccccaacgagcgaagaggagaagaagaagaagaagaagaagaagaagaagaagagaagcgaagaagaagaagaagatgaagaagagagaagatggcgaagggagtcaagtcagcggtaccagcgacgccggccaaatcgagtggaacgcgcaacgagacttcggtgcgctctggaagctcattctcgatcccaacgacgggtcggatggagtcgattgacgagcgttcggtgagctacgacacggcgattgattcctcggacgccaaagaagataacgaatatgaagactgggatgtccggactgcgatgtccgagacttcggaagctgcggttgtatcggcaggtcgcagtgaaagatcaaggtcgattacccgcgacctctccgacacatcccgggccccgagcccgcttacgacgcgaatgacggcgccaccgaggacttcaaaccctcggtgacggtaggaggggcaacccccaagccggcactcgacctcccctcaacggggatactccggcggccaacaaggtcctaggccggtgcctagacctgatgaagaccaagagcgaatggatgcagttgttctccccgaagcaagtccgccaggccatctggatggacctcggaggggcgttggctacgccgatcaactcaacgagcactcggcacgttgtgcagaatactgtggacttcttgcgagctatggggtgcgaaccccagatcctcccctcggaggctgcgctcgcgagttggacgccgaccgccgctgccacggcgttaaccaagtggaggaagaagctgcgtaatgcctttggagtggcggacgtcagttcgcgaggcccaacgatgcttcgttcgacctcggaggcagtagacccgtcgaaggtcccgctaccagcgacccctcggaagggagccactgatgacggtgtctttgcaaccaagggcgaagcctcgccgtacatgcaagactcacacatggtaaccccacgatctacggaccgtagacaaccagagctcaaccccaacgctcgagatcgccacgcatttgcctctcgccaacatcaagccgttctacggaacgcgcgacaagagcgagcactccatgcagtggctccgaacgttcatctatgagatgaagggaacgcatgcaccacccaacgagtagtgcatgccgttcgaacttaagctcagggatggagccctgcactggtgtcgccagctcccacgcaagacaagacgcacgtggaagttgctgagcgaggcgttcatcaagtactattgctcgaagttttcccagtctgcgaaggctcggtactactcggccaagcgagaagacaaggaacacgtttgtgactacctcaaccggctcaacggctacgctagcaacgccggtgtgcaatttgagaacggtggtcgtgacgcgaaggaccacgtggaacacttcttggccacgtgtgacgaccgaaacttagaagaccgtctgtgccacgtctgggtcaagagcgtccatgacctcgaagacatgatcaacgacatcctgcgtcaccgtgaccgcaaatcgaaccgagaatcgtcattccgccgctctcggagtcaagatgatggacgtcgacgcgatgcgaggtcgaacgaggattctcgtggtggctaccgccgcgaacgacgctaccacgacgaagaccgtcgcaaacgacgtcgccgtgacaacgaccgccgcaacgaccgcagtgaagacgaccgtcgccgtgaccgacgcgatggatcgccgtaccggtcccgagtcactttggttgacgcgctggtcgatgtgatggcagaatggaacgtcagggactcggtgggtgcgcgtaacgagggatcatacgccccccgacgtgatgctgggacgaacgaggattgcttcgaggacgggcgccagcactcggacgaggattcgcatgacgattacgactcgaacgagtctaccggacatgtcgctgccgctaacgacgctgagcgcagagccgcagccgaaggaacgttcgctcggactgataaccaacgcttcaggaacggaggaggcccgtccaaccgcgaacgagatggtcgtcgccagtatgggccgtgtgccgcgtgcgaaagcccgtcttactcggtgcacttctgctaccggcggtgtaaactgtgcaaacaggtgcacgacgctgggaagtgtgaagcacttcacgagctcaccaagcttctgaagtcgaaggtcgacaagaaggatctgtcgctagagctgcaaagcctggtgtatggaagccatttaaactaggcagcccgccaactgaaactgggttggtcccaatcgggctgccacagttagctgagcctgcggttgatgcggactatctgttcgcgttcatgggcaaaagcaaacggcctgacgacctgatgaacaacgatcgtgtgaaaccgacggaaaatggagagaaccgagacccaagtctcgttgagactggtgttgatgaagatgatgatgatgaacgtgatgaacacccgaccgaggctttgattacaagtctagcccaggtcaggggaccacctcggaacctcgttcgggcggtgaaagtactgcccggcgagagactggggtggtggtcgtccaaacgatacgacaagaggatgcgcatgagagctttggtcatgggcgctgtggacgacgcgcgaacgaggatcctcctcgacactggagcaaatgttagcgtgatttcagccaacgtcgccaagcggctacgtgtgcgggaagtccgggaccatggacgaagtcttgaagtccgcggcatcaacccgggggtgatggagacccggcgacgggcgctcgtgaagatcaccctcgggtgggaacaggtttgcgagttcgagatgtggataatggaccatagggctggtgtggacgtcgtccttgggatagattttatgatcccagctggaatccggctggacctattttatggcacctcacgccttccggacgaggtcatggtgccactgctgaagtcgcagagtgttgaggataacgaaccttacggcacgcagccctcgtgtggcccgaccgaggatttatacatccccggtcgcgcgtggcgagagtttcgactgccgcgccagcggctacctcgttcagagtttgatgtgtgggttcgacgcacggacaagcttgtgccgaccgtaacgaggcttcgacggggacagccggcatgggtacggctaaccaacattacgaccacagcggcacggtgtgccaagcatgactccgtggtgctgtgagtcccgcatggtgaattaccgcgagagactggctacgcaaggctagactcgaacaagtacaaggagtggcaggtgctagcctactcaacgtgccgtgatgagactctgcaaggacgagaacgccatctctacgagcaatggttggctgaacagccgcctgcggtcgagcgccgaacttacccgacgccacgaaagatcctgccgaggccaccggatgtcccgccatggccagaaggccgtcaacaagcaccgttggatgatgagtactcgtcacccgatgtacatagctacgccgacgaccccaggttcagtgaaagctcggtcgaggtcgctcgagctgatacaaccgatgtggaacgtgctggtgggtcgaacgatggttcgggcgacgaggccagcgcatcggatgactcggacgtacccggagattcgccgcctagccgagcgagctgcctgcccgtgaatgcgaacagtggtgctgactctactggccagggagcgacatacgcctcggttgaggcatcggaagccagggatgagctgagtgatggtggcagcgtgacgaacgacgattcggagggtgaccgcgacgtagtagcagtggccgagacaactacatgggacgtcctgccaacggggaccgctgcgcccagcctggagtcaggagaaacgtcggctgcagtgtgtagtagcgaagtcgactggggtgaacacgacccagggcctaacgacgttcctactgaagccggaacctccaccgctgacgccgacattgaactccatgattcggatgtgagtgcgatcgacgaccccgagcagctactggaggcgacctatatctcagtcatgcatgccatggttgcagaaggatctgacgaaggtgatgacaccttgaacggcgtttcggagcacgtagcgaacgagatttagcttaccgactacgcgcatgagctggcgttcttgccggacctaaccgaagcgtcgtagacgacgctggattactcagggcagaacgtcgagaatgacgagtgaggcgaggccgatgacgcctttgtcgcccaggggggttcgtatagcgcagcccaagactgttccccagggggtagacccagagaatcgacttgagagtcaacagcaataagatagacccagagattcgcagccgcaaagctttaaaccctgagaatcacactccgtggttggcgtgggtaccttgtgtaatccctgtcggctcgtttgtcttcgacataacggcactccaccggttgtaaatgtagcctcgaagaagtgcggaagtgcacgtctacttcagaacgcacctccacaccaaaaggcaaacccagagaatcagatcccccgaaacccagaatatcacgaattcagggtccaggatttcagtcaactctgggacttggaactcagaagacaccttacccaaatgccctcctagctcgataaaaccaacaaatacagagtatacaaacactacacctagccgtcacttattcttttggacccttggacggtgggtcacacacacactaggtctgaaattcaagggcctagctcccctgagactcacacaaacgcgcaccacctccaataaaggaggaaaatacaatcactatcagttaccttgccttcacacaagcagtcaatacaaaatcctggaggcgactacctagcaccccaaaataccctctggaataatatgaaatgggctaccacgagcacagcaagtgacccaaccaggatatggaataggtggatcactccaggaagctcaaggccgtcgctggtccccacctaactggacttgagtttgatggagtcctcacagacggctgtccttcgccgttgaagtgcccttagcgtcccgcggtcgtagtctcgggtcctccggatttccgtcggcaggcttggccgaagtcacttgcgcagtacaggataaaaggaactctgtttgtcttttatcagctacttctctctcttacttctttctcttctgcattcttcttcgggcaaatatcttctgttcactatgcttggggtcaaacgtcttgtcttgagtataccttgggttcagcggtcccaacttgcgatcggcttgcgactccatttgtcgcacggcgtcgaaagtgtcaattgtgggtccttggacttggtttaatatggcgcaggactccctctcgactcctcgaaggtatccagtctgcgcatccatagcggttcttcaaggtcacgcatcactttgattgcagactgacttcgagctgacttgaatccctgaaaatcatgtgacactcagggtcatcttctgaaatcctggagaattctgaggaatcttggggaactgtgacgattcttggatgttggcttgggaaacacttaagttcagtatagagagtctggatttatggtccaaacccagagaatcatttttggaactctgggtcacctgcactcagggaggtgaactctgggtcatcgtgcggcactctggattacaaatctgctacatcacggactcgcgtgtatctccacaagtccaagctttttagcgggtttagcggcctcctgcgcatgatcatggtgttagtggggtttgttctcagggcaattggatcctctggggcactctgagccagtagtatataacatcataaaatgaggttagtttttctcgaaatatgacattagcgagatatcttgttgaagctctacatcagtagcatttcaagtgatataaagttgttcagacccggtttagatctcctacaagcaatgctaaaacgtggtaaagttccaaggtacctaccttcatcaacattcgcaaaataaaacccaaggtacctaccttcacaaatcaaaatccaaatattcgtcaaggtacctaccttcataaaacgaaggcagtttatcatttagtacatttggttggttcttcagccagcggcaataaccaggatcagaagcaaatacttcttcaatggtcttacctttaaattttccaaaacttaactcagtcgacatgttggtcatatatacagataggtataagaaataataaatttaattaattaagcagaggtataatcttcaacctcaccggttacacggttgtaggtaagctcttgttcactaataacaagaactagaagcttgacaccttgacagccggcatttacaccctgactttggattgcttgtggtacgtcgcgttcggttaggcgagatacgtcagcgatgagcatgcggttagttagcgaccaagtttggtaatcaagtagaccattcacgagttcgggagttagatcgcgccaagcttcgcgacttcattagtgaagtgatggaagtcatagggctactacgaatcgctcgcacctgcgcactcagcccgcacccagcaccatcttcacacttagtctcttcctccattggatgtctccgagaaaactgctctttgctactacagaagtaaatatctgaagatttggttactggaaaatatgaacctgaaaaaattgattggaggagaaaatgaaattttggccagtggctgcagttgtactaatagtgcgtcactgttagtacaattgcactattagtcgaggttagtgcctcgacacacgagatggtcgtgggcgtgctggcgagatgaccccaggcttcggtcccgctgtcaagatgaccacacgcccacccccacactgccctcgtacccaaaacccaagccactgttgtcaaagatcatcgtcggctatagctccgagttgctcaagttcatattcgtgggcgagaagctgctgagcttcccctccgaccggtaactggtcctggctgccgacgtcaagcccgataccatgcagtacatgcccttattactttattgtggatgcagctctttaacgaacgcaacagctgcaagatccacggcgaaaccaaatcttggaggggctgctgagcaactcgctacacggtcgaagtatgtcgctgaggaacctgccgcagccataccagtactatagcatcacggtggtggacggcacaagagcgacgtgcccaactacttcccagcaaacttctaaaacggacaatacatggcttgacactgacaactcgttatattaaattaggcttacctaccacgatgatctgctaaatacctttcttctggtgggccctgcatgaaccaagctcatgcttatcatccaacgcaaactgctgaacactggttgtgggtagttcgctcggcatcttgttcagcattttcatgaaagcacgtcactctaccgcaatcgccgccgcctccaacttgtcggaccgcttagaggccgcgctcctgctcagccatccaatcctctgcctccacttgcccctgcagaagggaatggtacatctgcagcttgcggaccttgccaatgacggcgacttcgccaacccggtgcgggcagcgcactccgcccaggggacgcttacgaggcttccacattgtcacctgcaacgtgatagtgttgcgcatcgcgcggtccatcttggccattctcgccttcagcccagcctctttgccctcgaaaatcgcgtcgaccaggttgtaccgatacagcttgggctggtcctcgatcccagcgacacacagagccacaccaacgtagtcgtcctccttcggcttgtgcatcaggtagaactcgcgcaccccgcggaccgttcgcttcggcgggagtgcccgtaggcgcacttgctctgcgagcatcgcgtccatctcagcgaacgggtcctcttcggccatgaggcgcaacttcactcgagctccgatgcttgtgcttggctgacaattcgtttctgctgaatgcgcacactaggcacagggatattgaagtaaagcgtctctgggacttgccttgaataattctgggacttgccttgataatgtccaagcgctgtccctgctattgtcctttcacgtcggctcgacggtttgcagcaatccaaacttgtatcttgctacaaggcttgatctgcagctttatgcgagggttggaccatctgggttacgacagaacttaatggtccagccctcgtataaaccagcagcgggtggtgtaggttcgctgtcactgcaaccaacatggccttgaaggtctatgctgtattcttacttacgcactactctacactgtactgtggttgaaattcaatctggcccggcccacacagcacctggtgactacagcgtcagcccttcacttctgcgtagctgtttatcaccatggggcttatggtcgctggatacgaccaagatcactgtatttccacgccgatctacaggtgggcttaccccgtcgtgaagggcggcatcacgtacagtgcttagcgagcagtacaatactgactgccccaggtgatattgacctggctactctcatgtcggtcgttaacaaagacgtgctgcttttggaatatttaatcgcctgacgtcagacgcggcgtcctatcccatccaccatggttatggtacgatgaggtgctattgcacgacgagctagcaagaataattggagttgcatttgcatgtcatgatactgttatcattgtcttgaccacgtagctctgtggtgtgcgtcacgtactgcagcgacgcgatctccacgagccccaccgtggcgctcggcatggtcaagcgtatgcagcgtgccgtcgagcatgcccagcgaataccgaacatggcgtgatgaaaacaatgttgatcaatgggcagcaatgcacagcgcaggcgatcgttcatcgcgccgcctccgaagtagtaatggtcggtcggtgaggcccacacgtgcttatcattgccttgaccacgcagctctatgagctgtgtgcgccacgtactgcggcgacgcgatctccacgagccccaccgtggcgctcggcatgggccatggcgtgatgaacacaatgttgatcaatgggctgcaatgcgcagcgcagccgatcgttcatcgcgccgcctccgaagtcggtccgctaaggcccacacgtgcggcgttttattccaaaactgaatactcgttaaatacatcgatccgaccgcctctgttgctttataccggtagtaccagccgattttgaatactcaagttcatattaaaaagtaccgaatgtttataactgatggtctgacaagaaatgacgctggctctaagctatccgcttagagaacaatctgatccaagaggctgcagtgctcaccacggcgggaaattcacggggagctagtcgatggaccgctttcgtggggaacatttgcgtctaaccacttgccgcggtcgttgcggtcgtttcccagagcggtaaaatgcggccgagcagtgactttcatcgctgagaactcgcacggagtctgtactgtaatggtcttttacacgccatattgggcttgacgaatctactgcgtacatgtagaaccagagctgtcccgttaagaatttgagacaatggagacaacactgtgggtacctaacgagtggccggtcgttgatcgctgatcggcgggatcgcccaaaacgccgataggccgcatggaaggcattactgggcaatcagctctaattgcggccacgccagcatgaggatcaagcctggaacgaaccgaagacgaacctgggttttttggcgaacctgtaaaacctcaagaactaggttctcgaggttttatcggttcgtttggcaccgcactttagcgagagaacctgtgtgaaacggcaaattgagttcgtttggagttgccctggttggtcaaaaaatttcaagaacgaaactgcttagtgcggcttttgcagacggcatccgctgaagatgatgcatgcgctcgctgcgtttgctggtgcttcgcactgtgatgacgtgcaacctgatgtcgatcagccctcacaagttcatcgtcgacgccagctcactctacaggagggcatcattcaaatcaccgggcaccccattgaagtctcgcacgcgttgtcggatatccagctacgagcacagcaaacctgccactgctttgaacaccgtgtggatcaacttcttgtccatacacgagccgaggttgaaggtgtcgcggctacgatcgagcagaggctgcaaccgcggcttgaagaaagctttcgcagctcacagctagtggttcaatcaagcattggtcaaggtattgacgagatcacggctcgcgctgacaccgcagaaacgcgcctcattgaagctcgtgcacgactcgaggaagctgtggatattaacgttgccaactctcagctaattgatcctgataatttaattgcccgagtatgtgaagaacatgtgaatcaagctttgtatgtggcacaggcttcttttgatgcagcggtggaggcaaaagcggggtaccatgcatcgcgtttggagtctcgccttcgggaacatgtagatgagtcacagctgaagacgctttacaccgcggtagatctggcgtctgaacaagaagctcgcacgcaggaaaagcttgaatcgctgctgatgacggcctgcaaacacactgattcaagcgtagccgctatggagacaaacctcagcaaaaaaatggatgattttacctccaagttggatcattttgttgagaaaaaatggctacgagcgcaaaagctattgagcagcagcttaatattcgtcttaaagcaaccggcggccagcttttcggggaaatcaagcaggacgtagctgcttcacttgctgatgctgagaagcgcatacttcagaatcatgcgcttgctggagacaaaaaacaagccgaattgaacgctcgtatggacgatttacaagcaaagcttgcaaagcaactttccgatctttgttcgtctcaagagctttataagcagcagattgatgtttaactccgtgctgctgtttgtgagttgaatttgaaaatggagcagacagcaaaccgagttgtggaaaaagcaatattagcggatcgaagggtttccgagcagaaattcgcagacagtgaaactctcatggagaagcggattaacgataagctttcggtgatgaatgcttcctcgtgctccaaccaacagatggaccttcaaatcatcgtgagcaaccaagacgggatccccggccatggtttcagagagggccgcatgctaagacaccaattgaactgtgagggcacatgctgctttctagcatctatcggaaaccaaaagccacacagcgagcaaggatacggtgatcgctcggtcgtgcggcttttcaaggaggcacctgtcgctcattgtagcgaagattcgcgagaacctgcagcattcgcacctaggacaggcgatcaaaacgaacccgaaaaacctgaaccgggcgttttgcttcgtcggttcctgaggttatttgagcgaagacggtataccggtaaaccgtgttcggttgaaaggtcatctgtaactccgaaccaaaaaaaatggagtaccgtggttcggtctgcccagcttcgttacaggcctgatgaggatgatatgtagcgggttttgcttcatgcccgggggtttctccgttgctattttgaaatgcaaaaaatcaacggattgccgacaacgagtgatgccttcgagaaaggtcagcacagcgaaaagcgaaacttctccccccgctccagcacagcgtattcgtcctccacatcgaccacgcgatgagttcaacgcagcaccggcgcgcggttttccagcactcatggctgctggccgcttgggcgatggcgatggccatggcaagcatgagcgtgtacgccgtgcagacgaacgtgacgagtatctgctcaccgtccaaccccgtgcctctcgtcgtgaaaggaacgattacgtacgtctgtatcaacgtgaacgacgagtaccgcacgctcttcacgcctgtagcggataagttcacggtgctacgcatcagcgactgtaagtgcatcttgctagctgcgttcgtcgcaaacactaactcccatttttcgtgcactcttagcgtggaatgatacgcgtatcggagccaacccatcaggtgctttcctcaccgtctcgagcctcaagtatcgcaccaactataagctctactcgtctgcgtcaacaaatcgcatctccccgtacatgacggccattatctctgtgaagaaaggtgttgtgcaaggcgtcagctgggacgaaggctgctatttctgcacagcagagatgtgtgactacaacctgtactcgaagccagaagaatcggcaaccggacggctgagcggacaaggacaaacgtgttatagcgctgtggagagctgctcgggttattcaacgaacgcttccgatgcgagcgtgactgtcggtgacggcagctctgccggttcgaatagcaccagcaccagcaccaacaccactgcacagtgtgatctcacgatctacgttggttggacgggcacggacaagaacggtgattatcttggcagtgcgtcgctgcgtatgtcccagttctcgaagtattcgatcggctcgttcttctcaaacatcggtgctagtctttctaagctcgctccaactagccgctcagaagatgcaaattaactcacaacagaacatcagccatttcagctcggcgtgtttcatggtgaattgtgttttcttgtagtgcacactttcaagctctgtgtgccagttctataggggcagtctagcctgttgagcgcgtagctatcagctacctagcggtagtcgtggatctggcggtcagcgttgtctttcgccagcaccgtgtcgagattgtcccaccatttaggtagcaagttagaaccgatgaggtggaaccacggcgagagcttccgcgtggaatcattcaggagtgctggcaggttctcacgagtaacgaactcgacttgttccacctcgttcttgttcacgttgtccagcgacacgtcgccacgcgcaaacagaatgtggtccatttcgtactccgtccaattagcgtctgacgcagcctgcggtcgaaacaaggtaaacatgtaagcgcccggaaacatctttaagaaacatgttgttgaagtcgcgtaccttgtacatgaccgtggagacgtaagccaagtcttcgagtgcaaaggtggaagtaggaatgccaagctcgtgctccagcttgcggatggccgcacgtttcacaccgaagccgtcctcgagctctccttcagtgaaaagcgggtggctgcaatcgcaaaaccaagttacgctccagcacacagtatacacgacgttgtagcgccactctacctgcagcacgtgttcgcccagaagctggggaaggtgatcttttcgctcgcgcgcttctgaataagcagctcgttcttcgagttgaagacgaacacgctgaaggcgcggtgcagaacgccgtcgtggatgtgcgctgtttgtcaatccaccggaacaagtacccccactcagttagctaggtgcatctttaggtacaaggccgacgtcgacacgtaccatccttcttgctgatagggcccacgacgttgtccagctcgtccacttgcacgatctgctccttcatgaactccagctgctcggcgtcggctccagccgtgagctgttcaaacgtcacacgccccgccgtactgaaggcggccgcgccattgcgcaccgccgctcccgccagcgcgccaccagcacgcacactcgccagcaccatgtttccttgttgtactccgattgacgactgtgggggaattcgtacgtacctccggcaaaagtattttcaaccaaccaatggagactgtcgtcgtcactaccgggagagatcgcggcgctgcgatggggatcagccaaggccaaggcgtctcgataggtatattatagagagagctttatgcaggacgccagcctccgccccacgtccaagcgacgcaggggagacccagctacgtggtaacttcctatcccagtctagcttcgccgcagtagcaccgcagtcggtggtcaaaccgcccaccacgagagtggcggccttcgagagcgcggcacacggcacctgcgggagttcttcggcctgtagcgcgaccatcactacgcgcattctatttttccttcgccgcatcgctggccggagcttcctcgtcagggtccttgcgctctagcgcttccttggcccggaaaatcttggactgcaggtagaacgagccacccttggctgggtcgttggcttcgaagtaccttgtgaactgcttctggatctcctccgaggaaggcaccggtccactcgtggggaagttgagaatctcgcgcgcttgctgcttggacatttggttcttgcgcaccaccgtcttcgctgccatggcgccagtgttgcccgtgcgagcgttgtggacggcctgctggtaggcctgcacgaaggccttagacacgatgcccgcgcccatgaccaccacctgcgcgatgattcgtcccagaggtcccgacatgtctgccgctgctactgtagctgtcttgttcacgtttgaccctctggttcagaggtggcagggccgtcgtacttagcgtcgagccccatccaacaatacatcgtacttagtaagaaggttgagtgcaagttgaagctcgctttgaatcgctttgacttgagcacaagcccgtgctctgctctctttggcatgtaggttcgtacctggttggcgtctttttgctaagcggagcatcgtacgtggtgagcctgcactcattcttcagcaccacgtccattatagttgttgcccatgctcgatggccgaacccctcttgtcgtggtcacagtcgcttagcgcacgcatccacccccttttccgagtagctatttgcatttgtatttgttgtcgtttaaagtctaaacattagacggctatcgactccagatactggacctgagtggccatattgcagcctttccgaacacggtaggagccaccttccgacatggtcgtaatgatagtagcgaccatggtttccacgtcagtacaacgaccgaagcaagaaaacgcggcggaagctcagatgcatccttgagcaggattaagcgcgtacgaacgcaacaggagactcatgatgacggcggtctcttgccgtgtaaatggtaggaagcacacaatttagcatggtaaggacttgcagcgcaacatggtacttttactagtagcaagcacgctgtgcaagatgataggcagcccacagtgcagcacttagccagcttatactgtaacacagcagcaagcagcacgtcgtgtcctgtaggaaaccgagctgacagagtacgaaagcattgagggaggtgtcgtgtgtactgagaatacttgtatgatgtctgaattcttcaggctgaagagaagtgggccctcgtccgcttcgaagctgcatatgcattttgctctcattctcatgcgggcgtgcgcgcatcttaccgtctacatcaatgggtgtgacctgttaagtttggtcacgtgacctagcgtcctgatgtgtgacctgtttgaccatcattcccgtgaccaactgttaggattgacctgttttcccctcttcgattttggatcaaattgacctcttgatagaatgtttcatctaacactcatgcgtagactctcggctgtggacttcgaaacgggctgtacgggctttcgggacaagcaaaataaaagcgacaggattttgctccatcagtggagcgattccatgcactgtcaaagtgcattgccggttgcccggcagactacgtagctacatgcagagtggaatggtgcttagcgttcagtttaggcaagtaacgcaatacaccgcggcgcccttaccggtgacgtcgcccttccccattaataaaaatcagtggagcgattcccgcagcgttttgggcgtctcaaatcggcacaattccaaatatttttggcgaaaataccgacgatttcccttacaaatacaaagtaacgtttcgacgaatgtattatacaaatgcgagatatcgccaacgacaatcaaaagatggtcgttacaattgattgacaggtataatactcgtacgcgttaattattaatatctcaaatagtgcaacggttgttggggctattctcaatcctccagtcatgcagttggaatttcttcacgaattagagtctatgacccatcgcgacaaccgagctctacggctggagctgctgccttctggaacgccgctctcacagacttcacccactgccacctatgctcacctcggcggactcacgccgctgccgatgcgtcacccaacagaaacggaaggcgcagggtgggtaagcgaaatgaacttcatccgcgccgatacaccgagccaattacgtcaacgcttcatccagatccaagtggttgatcaaagattcaaggagccgacctggatgcatcccaacattggcggtgaggcgcagtacgttcatggccccgtagaagaaattgctgctgttcacgacgaacttgaagctcgcgagtcgggaaacaagctcggagagtggacggccacctctatcggcggaaacgacatcatgtccagcgttctgttttctacggggcaaaccatcgccaaagctgggaaactcgccccagtcgcccaactgctcgtgacaattgtgatatattgcctgcgctgggtctttgaggaagtgatgagtgctgtgccgctgaacggaggattttacactgccatgctcaactcatccccgaagaaggttgcggcagtttgcgccgtgttcagcatcttatcgtatctggcaactggagtggtgaacggtgtgtccgcgatgaattacgtgaacgagtcgctggtggagatgccagtgatgatatgttccattggactgctggcggccttcgctctgctttgtgtgatgggaatcgcggagagcgctttcgttgcactgcttctcttctcctttcacatgttcacgctcgtcttactaagcgtgttcagcgtcgtctatgtagtacagcacccgtcgatatttgtgggcaatatgcacacatctctccctgcagtgacgatgtttggctcggcattagaaggcaccaatgtcttctccgctttgtttttaggctatggtacggcaatgctcagcgtgacgggcttcgagacttcggcgcaatacgtggaagaacaagcggcgggcatgtttccaaaaactctgcgcaacatgtgggctctctcgagcacgttcaacgtggcctactcgtttttagcgctggcggttgtacctctggatacgatcatcgcgaatcagtcgacgctgttgtcgtacatgggtcgacttactggtggtcgctggttggaaatcctcgtggctgtcgacgcgtttggtgtgctcgctggcgcagtcctgacggcgtacgtgggtatcaatgggttatttcagcgcctggccattgaccgtgtgctgcccagcttcctgctcaaggttaactcatgtcgtggcacgaaccactttattattctcgtgttctttatcgtggcgtcgagtctcgtcttcattctcgatgctgaagttacggtgctgtctggcgtcttcgcgctcgcattcctctgcgtgttaatgtgcttcatcgtcgcgtgtctgctgctcaaggcgtgtcgagagcaaattccacgggaaaaagtcacgtcgtggaccaacacaggcttttgcttttgcgcggtggctttggggatcctcgcgaacgcgttctcggatcttaaggcgttgtcgtatttcttcatttacttcgcagtatttttcctggtggtattcctcatgctggcgcgtgtgaatgtgctgaaggcgatgctgtttgtgtcgcgcaagcttattctgcatttccgaggcgacaacctctccgttgaacaatgttcgacacggggtcaggcctttgttggcagcgtgatgatcgctaagaccatcgagacgatcaagaacacacccgtcgtatttttctgcaaagtggccaatctgcccaaggttaacgaggctgtgcgttacgtggtgcagaacgagcacacgtactgcctcaggctggtgcacgtgtgcgagccgaacgcccccgttccacgtgagttcgaggacgtggtgaacctgttcgaccacatctacccgtcgaccaagatcgactttatcgccgtgacgggggcttttgacccggcgatggtgcagtggctgtccaagtcgatggcaatccccaccaacatgatgctcatgggccaaccttctagcaggaagacccaccaggtttcggcattgggcgtgcgcatcgtcacagaataagtcggtggagtagcaaaggttgtaagcaagatggaaacaagtctctactattagtcggctgccgcagcatgagacgcgtaaaaagtgtttaccatgcgtctgtaagtttgaggtggctgaagggcctgaataatattgggaggtaggccggtggtgtgaactttagttttcgaaatgactgtgcggcaagcaaccgcgacaaattgggttcgatgtagtacatcagctctgacaagggggtcgatgatcccaatgcggactatgtaattaatgccatcctcctatataaaaacaacgataaattccctcccgtcaaatctgtaaaactgtcataaaaaacacacggtgtgttgcataaagtacacaaaaaatcatataaagtacacaaaaccagatggtatacaaagatgaagtcatttgattgaatcggattggctggtttgctcatgttaagctttgcttgacgtcgtctgccggctttttgtgtctgccggctttgtaagtcgttgtctgtagaggagctccccattatgttttacttcgaagtatattacttcgaagtagtaaagttaatgtcaagtcgctttaatttcaaacatcttgatgtaggatggagtgcctagccttgtttgcttcccaagtcacagcccatatcgtcagtgatggtcccgctggaagtagcgcgtcccacacgaagaaggcggtgcgaatcatttgttcatctgtgtagcttaatggttgtgatagaacacgagtaactttacagtgcggataccatatatgcaaggttttacgtctgacttggccttcgcgttaacaataagaggcttcggaaccagtgcttgaaagggttagctgagctgaactcggccgtgctggctcagctcgaaggaaaagataactccgccctctaaataatttagcgtgttttatccaccagcttagctagcagtacaagcagcgtgaacgcactcagctgaatgatgcatgtattacttgctgttgaagttgcactcgctaatgcaagcattcagtatcgcaaatattcgtgtaagaatttgagggcaatgaagttgcccaaaggtgcccaactataacgagtgatgcttcaacttcagtgtactgaagctgaagattcttcgttggacgagaagcaattagacgacggccaactggccagcatgcagcgaatccaagtggcatcgaccacttgacgccccaccaggtgaccagactggcactggatcacccacaagcgtttggcgccagcgcgtacatgggccacatgcggcgcagccattccagtgtagcaggctgagcgggggcgactatcccatccccccccttcagtctgcctgcaaaattgccgtctatacaaagacaccggcaagcgagccgcagccagcgaacgaacgcaaaagtctccgaggctgtgcctggagacctgcaaggccatcgagcgcaagttgcgctttgcgctgcgcaacggtttgggataagatccttccggtcaacttgccgctcctgattccccgtgccaaacttggcgcggccagcagctggagagtcattgcagtcgatgcgcaatagccatccctttgcgcagcgtccgctctctgtcttagtgcagccttgaataggccaaccgttttcagacacaccacgtctctcccaactcagcaggtgtcgctttcggctgcactcaactgtcactcggcttcctcgtcgagcgcggcccactttgcgctttcctcgcctcaagtcatggccgagccccgccgcaacggagacctgcgtctggaccttttgggccccgagtcccccagcggagactatgcgggcgtcacctcgctgtcggtgcaccagcctggctgggtgagcgagatgaacttcatccgcgctgacacgcccagccagctgcgccagcggttcatccagatccaggtcacggaccggcgcttcaaggagccgtcgtggatgcacccgaacatcggtggcgaggcccagttcgtgcagggccgagcggacgagatcgcggccatcggccaggagctgcaggccaacgagaccaaaaacaagctcggcgagtggacggccacgtccatcagcggcaacgccatcctgtccagcgtgctcttctcggctggccagaccatcgccaaggccggcaagctagcgccggtcacgcagctgttcgtcgtgacggtcgtctactgtctccgctgggtcttggaggaggtcatgagcgccgtcccgctgaacggcggcttttacacggccatgctcaactcggcgcccaagaaggtggcggccgtctgcgccgtcttcagcatgctgtcgtacctgtcgacggccgtggtcaacggcgtgtcggccatgaactacgtgaacgagtcgctgttcgagatcccggtcatggtctgcaccattggattgctagctgtcttcgcgctgctgtgcctcatgggcatcgccgagagcgcgttcgtcgcgcttatcttcttcgtcttccacacgttcacgctgatactgctggccatcttcagcttcatctacgtggtgcagcacccctccgtcttcgtggacaatatgagcacgtctctgcctgacgtgacgatgttcggcggcgctgcagacgccagcaatgttgcgtcggccttgttcttgggctacggcacggcgatgctgggcgtgacgggcttcgagagctcctcgcagtacgtggaagagcaggccgcgggcatgttccccaagacgctgcgcaacatgtgggccttgtcgagcacgttcaacgtggcgtactcgctgctggccctggcgattgtcccagtcgacacaatcatcgccaaccagtcgactttgctgtcgtacatgggccgactgagtggaggccggtggctcgaagtcctcgtggccatcgacgcctttggtgtgctcgctggtgcggtgctgaccgcgtacgtggggatcaacggattgttccagcggttggccatcgaccgcgtgttgcccacgttcctgctgagggtgaactcttgccgcggcacgaatcactacatcatcttgacgttcttcctcgtggcctccagtctcgtgttcattctgaacgccgaagtgacggtgctgtccggcgtcttcgcactcgctttcctgtgcgtcctactgtcgttcactatcgcttgtctactgctgaaaatctgccgtgaagagatcccgcgcaagagaaccacgtcgtgggccaacacgtgcttttgcgtgggaatgatctccatgggcatcctcgcgaacgcgttctcggacgtgaaggcgctgtcgtacttcttcatctacttcgcggtgttcttcttggtggtattcatgatgctgactcgcgtgagcctgctcaaggggctgctctacgtctcgcggaagctgttgctgcactttcgtggtggacaaacggacgcgaatcccattcagcaactgtcagcacacggccaggtgttcgtgggcagcgtcaagatcgccaagatcatcgagacgatcaagaacacgcccgtggttttcttctgcaaagtggccaatctacccaagatcaacgaggctgtgcgctacgtgatgcagaacgagcacacgtactgcctcaggctggttcacgtgtgcgagccgaacgcccccgtgccgcgcgagtttgaagacgtcgtgaacctattcgaccacatttacccgtcgatcaagatcgactttatcgctgtgactggagcgttcgacccggccatggtgcagtggctgtccaagtcgatggatgtgccgaccaacatgatgttcatgcgtcaacctgcgaacgacaacatccatcgcgtgtcagcactcggtgttcgcgtcatcacggactagaaagctgcgtttgccgtcagtatgatgctttgagagcaaaatctacctatgacttcgagagcaacagcgctaaattaacgagttttttttccctgaactacgattactgctttgaatcatcgcccaactacatcgaggagcagcagcccggtgtgttccgcaagagagctgaactcctcggctagctacccgcgactgctatctgcggaaacgacatcctgctcagtgtgctgtactcagcgtcgtccgtcgctgcgaaatcgggcaaattccgctgctgctggtctcttcttccgcttcatctacgaggaggtagtcaccgccaacggtggtacctacaacgccctgctcaacacgacctccaagcggacagccgccttcgccgcatgcctggggatcttgtcctaccacgggcgtcgtctccgccaccaacagcgtgcgctatctcaacaaccccgatcgttggctcgaccattattctgctgggcgcgttcgcgttgctggcggtaatggggatctcggacagctcgcgggtggctacagccatcttcctgcaccacattgtggtgctgagcatcctgttcgtgtcgagtgtggtctacggcatcaaccacccgcacgtttttcgcgacaatatgcactcggagtacccggcggtggacttcgcgggttccatgctggacggcaacgtgctgaccgcaatcttcttcggttttggagcgtccatgctggggatcacgggctttgagtcgtcgtcgaattacgtggaggaacaagctccaggggtcttccgcaagacgttgcgcaacatgtggggtgttcaacgtcggtttaggtgccagtatcctcgctgtgctgcctcttggcggatcgaatggaatttacaagaacgcggatgctctgctggcgaagattggtcgtgaagcgctgggaagttggttcgagtcgtggatctgcgttgacgcgtttgtggtgctatgcggtgccgtgttgacttcgtacgttggcatctgcggtctcgtgcgtcgtctatcaaccgaccgcgtgttgccgagctttctggccaagacgaacaaggcgcgaggcacgaaccactacatcgtcggcatctacttcctgctctcgtccagtcttgtgctcattttgaacgcggacgccaccactgtgaacggagtctacacgtacgcattcctgggtatgatggcactcttctcatgcgcttgcatgctgctgaagggcaagcgatcggagattccggcggacattcacgcgccttgggctgtggtggtgatcggcttattgatggttgtgatcgccatttttgcgaatcttctgggtgatccgtccgtcttgatgtacttcgcgctgtacttcgtcgtggtggccttcgtgatcttcatcatgttcgagcgcgtgacgattcttcactgcgtcctcgtcattttgaggaagttggctccgtcacggtatggtaaggcggctgcaatcggtctagcgacgcatcaaccgtctcaagaggagcacacgggtgctcgtggcggccacacgatcgcccgcaccattgtcagcatccgcgacgcccccatcgtcttcttctgcaaggtgcccgacctcacgattatcaacaaggccatcatctacgtgcgtcgtaacgagcagaccctcacgctgcgcatcgtgcacgtgttctcggacgaggaggcggacgctccggtgctcgcctcgttccgcgagatggcggcgctgttcgacagcatgtacccgaagatccgcgtggacttcgtgtcggtgcgcggcgagttcggtcctgcgatgatcgagtggctgtctcgatcgatgaaggtgccgttcggtcctgcgatgatcgagtggctgtctcgatcgatgaaggtgccgcgcaacatgatgttcatcacgcagccagacttcctctcagccgagcgggtgtcgactgtgggcgttcgggtcatcaccgcgtagctggtccctaggcatgtgataaacagaaacaaagcgtgtaacgtaaagagacgaatgaaccagagcgaacgcatttattcctagatcctctttacacagcggcagtttttgcttgcatctttatcttcgatgtcaccgtattatccatactaccctgtgaaccaaaaacggcgtccctaagagcatctccagcggtgggtcttatccaaaggccctggtttctccgtcggtgtctgggtctggggatatggggaaaacatctttcatctccgaccagactccaacgtcatcggcaaatggttcacctccgccagaacgggatctgacggccccaacggctgcctaggacaggcgattcaaaactttccgtcccaattgggcaccagcgtccaacggcgtcgaccaaagcgtggttctctctaccagggcgtcgcttacttaaagtcgttgttgtccctgatcccagcgatcgtttgcaaagatctctcttgtgtggactcgaatccattctctctttttccgtctccaagccaagtcctcctccagcgcgcttcacctcgacaggaatcggtcatgacggagcccaatcctactggagcattgttggcgccgtcgcccacggcagtctaccgcgaagcgtcttcaccaaaactcgcagtctgctcggtggacagctcgcgagcgctgaaccttcgtcggcgcaagatcgagatcgaggtagtggacaacggccccagaggaccggcttggcagttcccgggcttcggcacttcggagcacgtccaggcccctcaaaatgagctggccgacattcaagtcgagctgaatcaaccacgcaaacttctgggcgagctaccggcgactgctatctgtggcaacgatatcctgtcgagtgtgctgtactcggcgtcgtctgtcgctgcgaaatcgggcaagctcatgccgattccgctgctcatggtgtcggctgtgctgttctcgttccggttcatctacgaagaggtggtgacggccatcccgctgaacggaggcacctacaacgctttactcaacacaacctccaagcgtactgccgcggtggctgcctgtctgagtatcttgtcgtacgtggccacgggcgtcgtgtcggccacctccggtgtccactacctgaacaaccaagtggagatcccgattgtgagctgcacgatcgtcctactcggcgccttcgctcttctgtcagctatgggcacggcggagagctctcgcgtggcggttgtcatcttcctgcaccacattctggtactgtcgatcctgttcgtctcgtgcatcgtgtacggtgtccagcacacatacgtcttcaaggacaacatgaaaaccgagctgcccgaggtggactttgcaggctccatgctggacggcaacgtgttcacgtccattttcttcggcttcggtgcgtccatgctgggcatcacgggctttgaatcatcgtccaactacgtggaggagcagcagccgggtgtgtttcgcaagacactgcgcaacatgtgggcactcgtcacgtttttcaacatcggtttggctgtcggcatcctagcggtgctgcctcttgaaggcgacgacggcatttacgcacacggcgaggcactgctggcgagagttggccacgtcgctgttggaagctggttcgaaacgtgggtatgtgtggatgccttcgttgtgctctgcggtgccgtgctcacttcgtacgtcggcatttgcggtctggttgaacgactttcgaacgaccgcgtgctgcccgccttcttggccaagaagaacaagctccgcggcaccagccactacatcatcggcatctacttcttcttgtcgtccagcctcgttctgatcctgaacgcggacgctacgacggttaacggagtctacacatacgcgttcctgggtctcatggcgatgttctcatgcgcgtgcatgctgctgaaaggtaaacgctcggagattcctcgggatatccaagcgtcgtgggccgtcgtcagcttgggcttcttgctcgttgtggtcggcatcttcgccaacctacttggagacccgtcggtgctcatgtactttgccatctacttcatcgccgtgatgctggtgatgtttgtcatgttcgaacgagtcacgattctccgcgttgtgctagcggtcctcaaaagtgtggccccatcgcggttcggaaaggaggcgttcatcggaatggcggacgatggcaccccggaggtggagcacacgggtgctcgcggtggacgcaccatcgcccgcaccattgtcagcatccgtgagacccccatcgtcttcttctgcaaggtgcccgacctcacgatcatcaacaaggccatcatctacgtgcgtcgtaacgagcagacccacacactgcgcatcgtgcacgtgttctcggacgaggaggcggtcgctccggtgctcacctcgttccgcgagatggcggcactgttcgacagcatgtacccgaagatccgcgtggacttcgtgtcggtgcgcggcgagttcggtcctgcgatgatcgagtggctatcgcggtcgatgaaggtgccgcgcaacatgatgttcatcacgcagccagacattctgtcggctgagcgagtctccgctgctggcgtccgcgtgatcaccgcataatagcaaaacctgctgcgattcacttcaacttgttcattctggacaaagtacacatagttttgacgttttgcattccattcaccatttttcagtttcaacaaagtacaggaatatctcacggatgaagctggaggcgcaagcgctcgccgctgagcaacctgctgccgccaactcgagcccccacgaccccccaacccgctttcttctccatctacagaaggtgctgctccctaggcacttagtgtcaacaactgcggacgcgttagaacactgccagctaaagcatggtttctgatactttttccagcaattccgacaccgccggcgctatgagctcacatcgtgtcttgccggactgctgggcattgctctgatgctcgtggagtgtgagatcgttgaacgcggccaggatctctccgcaccttccgagacatgggtgcaagtgcttaaaagttgcgtcttggggtcgactgttctgctggacgtgctgctggtgctgagatatcgctgcgacggccaagtgaaccaactgcagagctcaatcccctcgagacgacacaagttttcactctggaggcctgtgttgctggcgctggagctggttgtctgcagtttccatgtgccaccgggtgttagtggagagtttgagatcgtgcagctgcatggagctgcgagtgccgaggacgactcggtctgtgagtcgctgcaacaaggcattgatactgttaggcgcggtgatggatgctatttggtgtatcggtaccctgtggaggcgctaggcgtgttcatggctgcgaggctgtacttgctggcgagattcgtgcgcagctcgtcagccctgcactcgccctggatctcgcttgtgggatcgctgaatggagtggacgctatgaagccgttcttccacttcaagtccattttcaagcttcatcctttgaatgttttgctgccactcacagtgctgaacacgctgctgactgctgccattgtgcgcgttctggagcggccggttcaagctgccttcgacaattattggatcgtgacgctggtaaatgtttacctgattgtgtgataatcgacacttactcagttacctgtaaatttacctcacttccgggaagtaagcgggaactaaaatcacctacaggtaaatggagaacgctagatccagcgcatccaggccaaggcgatgcagctctcggctttaattaaaagaggagctggagcgagcgggacgagcgagttgacagcaacactcaccaatattttttttattccgaggtgaaggatatgacgagaagatcaagtgaaggaagatgcagtacatgtagtttacagtacagtagcgtccacgtttcaagttcaggcttcttattggctaattgcaccttcaactaaatacgactttttttgcgttttgaaaacaatggcaaagcgacatgaacactggacatttctagaaatggaattgctatatttacctacacgcacggttgtgccctcgatgtaccacagctcgaccacgggcgtcccgcgcttcacgcgcttggtgtacagcagcttgaccgtgcccttggtcttcggtagctcgtccacgggggccatggtcttcgggtccagcagctcggccacggtcgtcgggccctgcacgcccttgggcttcggcagctcgtccacggggccatggtcttcgggtccagcacgtcctcggtctccagcagctcgccctcggtgtccagcgtgcctacaatggccacgtaagtcgtctttaccacgctctttgtctcctgcagccaccagcatcttggtggctagcagctcgcccagggaggccacggtcggcgagtccagcgagatcagcagctagcccacggtcgtcgggcgctggtgaccagcagcgagccattggtggccagcagctcgctcacagtcgtcgggcgcagcgagccattggtggccagaagctcgcccagggaggccacggttggcgagtccagcaagtccctggtgtcagtgtcagggccgaggttcgagcgcaccacgctctcctactgcagcagcacggtcgtggacagcaaggcaccggagggtgtgccgtccatgatggcggcgactgccagcgtcttctccagcggcgcgtccggagcggcgtgcaccgctcaaccttattctaatgtgtgcatgtcctactgcggtgcttatatgcatgtgtgtactacgtatgcgggagcaaacgccttcccagtgcgttgcgttgcgttaggcgcgatgcgtgttgcatgcaatcgaatgcgctatctcccaagcagtcgctaagcgcttttaatgcgcctctagccaacagcgcagttaggttaaaaggggagggcgagcgaacgcgagcgcgagcctcgctgagcgcgttcaccgatcgtcaacacccgccgatcaggcgggggcgggtctgcgctgcaacccgatattttttttcctagacaccgcgcctggccgagccgaggactgcacgagggggtggggcaggccgcacagcggcgccccccgaagtgccgtcgctaagtccgcaggcgaaagccaacgcgagtgtcctgccaactaggaatagacaacacgtggcgcccaggtagagctgcgcgtagatcccgtagagcccattctcctgctgcatgtgtcggcgcgtacaccatgacgcgcctgctgttggcgcacgccccgagtgatacagcgtgtccactattgtcatattggtaaaccaaatattctgctacgagagataccgtaacattgtgcaatgttaggcagaggcaccattgttgcgctcaatgttacgcaacgccaacatttcaatgttgctttaatcagtgccgattagaactgttgcctgtctagatcaagcacaactcacgcttgaaatcgtttcactcgtacttaatcagagagatagtgtagactttgattggtggacattccctaaaccctaaacccttcgtggacccaattccctactaagtacgaaacgtgaacggaaagtggaaagaaaaagtgggcaaaaaattagttttttttctgaatgactcgactcgcgtcttcactcgagaagattaaaatcacgtgtgccacggaactccatgtaagccgacggtcaccaacgccaaggcacgccatcataacgcgcccaagggttaatgacgaaagcagagctgcttgcaaattccccacacacaggcttcagtgtgataggcaggccccggggcatcatgggatgtgaccgtgtgcacttgtggcagtgtttacttttcacatggcggtcggtcgcagacacatcgcactgttgatttctccttcctcggaccaagagcgcggcagcgtccagcttgcagcgacacgatgaagcctctcttcatcctggccaccgtcttcgcggtactgttcgtctccaccgctctagctgtagcgacgggggagacttggccctcgcttcgcttcagctttacgatcagacgcagcgccatgcaggtccacggctactccgacttctccgtcgtggccaaccccatcgtgtccgagcacgataccggcagccgtgtgctgtacgacaccttcgctacattcacggaggactcgacactatacgactacacgctcgtagacgggaggtcgtacgtctctcaagtctctttggacgacagcagctccaacccgtcggtggaatgcgaagaagacacggcgctgctgtcgattaactcgatagtgggtgccctcgtcgaggccgtccctgtttcgagtataacgtcgaagagaggtggagcaatcgaatgctcaggtggcgacacgttcaaagtttcggtcgatgggatcgacttcggggtgtgttttacggggcgtacaggtttcacgatgtatggcaacgacatggacatcgaggtggagtacgtgaaaactcaagagaccattccagccccgaaaggagtgccagctaactgcgacagcgtggcatcgccaagttccgtgacatcgatcgggagatctctgcttactggggagtcgatgtctcctcaggacgccagaaggttgaagtcagcttcgctcacttttgacttcgtacttggtaacgatgacgattcgtgttcgtgcaagtcaacacctcggccgtgtatcttcgtccatggacttggcatttccaaagaggaaccggaaaatctcgatgtcttccccacaaattactggggcaatttgaccgaccacgcgccgtgctgttcgtcgatcaagtacgctatgctaaacacggtgaacaactcgtggaccgacgatgagcagcaacaaaaagtgtgcgatcgggttcttgcagtaagcaaaaccagtcagggaaccatggtctcggacactatcattatcacgcactccatgggcggactgttggtggctggagcgatcgctacaggcaagtgcagtcttgacaaaagcgtatcgtgggtgggtttgtctgcgccgatgcgagggagtatggcctccaactacttccaggactcctgcatgaacgagaccaacttcattgtcgaagatttggctgcaaaaactgggttctgccccgcggacgatggaatcatttctctcgcgtaccaaggtgacgattacagcacaccggaacttgatgcagcgtacgcagcagctcaaaaggtttatcgacgagaggtgacggccttaatgtgcagcaacggattctccgggcttcgatccaagcggcagtggtggtattggaccctgggcactgtggtgcctcacaagtctttcaagaacgatggcatggtggagttccacagctgcgcgggcggctttcctcccgcacactttggaaacagctacaaaaacgcattctacgtgacaaagctgaatcatgccgacactgcgtttcggaatggagactcgctcttgaataaggcaaaaatgccgttgaagtggttccagtgtctgctctagccgcagctattatactttccgaagcaaagtattagagttgtcactgcagttcacagagggaattgtttccctttacgaagactataatatataccttcgtgcatacacagttttcaccgtcagaccactggcatgagtgactcgacagagataccatcagacgcagtgacaaagttgaggacaacctgccaacagcaaaaaccatccgagttggctaaccaagctccgaataccacggtacttgtacttgaggcgaaaggcgctcaattgcacttgcatccccgagtttccctccggatgggcgtcacgacgacatcactccaatcctagtccagtaaagtcggccgcacaaccttcattatttttcattttgctcgcctgacctcgactgcggtaagcggggatgatgccggcaccacttctgcagttgaccgtcagcttcgccgtcttgctttcactttcaagctcaataatcgcagcgggttggagaaactgcagtacgaacagcaaaatctacagaatgaaaccacgatggactggccgtctctgcgatttcatttcaaggtcaagcgcagctccatgcaagttcgcgggcagcagaagttcaccacgctggccaaccctgctgccattggtgatggctcccaaatactttacggcactctcgcaacgtttacagattcctcgaccgtcaccaactacagccttgtgaacggcgtctcgtacatttcacgcgggtctcggaacgacacgacagcagctccctcggtgcggtgcctggacgtcgacgtcgtaccaccggtaaacgcaattgtgtccgcgctcaatgaagcgactccagtctcgtcaagcggcggcgtcaacattgaatgttcgagcggcagcttgtacagggttcttgttaacggtattaacttcgtcctgtgcttgatgggatcattgggcttcacgatgcacggtagtgatctagatatcgaggtggagtatctggtcagccgtgtggatatcgtggcgccttcattcgtgaccagtaaatgtgagaaggtggcatcaccgagctcagtgacgtcagtggggaggtctctaatacagtcaaacctgtttatatgatcctctctatttgagccatgccgtttatttgatgcaggctttgtcgctaccaaatgtttcacttagtttttgtatgatctctgtttatatgcatacaaggtatatgagtcacatttttggggaccaaattaggtctcacctgtttatttgattcacacttcggccacacacaccactgctcaacactcaacgcctaccgcaagccttcttcgctcgccatgtctcctcgcacctgtctgacgctagcacaaaagctccaagtgcacctaaagctcaagcagaatcctggcatgaacaaccccatgctcgccgagtggatctacgcaactttcaaggcccgggttagccgtgccacactcgcccgacggcgcaacctgccttcttcctacttcagccacgtcgacctgagtgcgaccaagcggcgccgagtgaaattccctcagttcgagcgggaagtgagagaatttttctttcagaacgaagctaaaacggcgatggcggacgacgtgctcctgctgaaggcgcatgagctggcggagcgcttaggcatcgataccacgcagctccggctaagcaacggctggcttcaaagctttaagaagcgcaatgggatccgctcccatacgctacacggcgaaggtggcgctgtagaagctgatgaagtgcgagatgagaggctagagctacaagagttggtggcgcagtttacacccgagaatgcgttcaacttcgacgaaaaggcgcttttctatcgctcagcgcctaatcgaacgctagctacgactattcgcaagggcaagaagaaggagaagcaacgtttgactttggccttctgctgcaacgcgactggctccgacaagctcgacccaataggcatcggtacggccaagaacccgaggtgctttaaaaagggagcggcgattaaaggtaaacctatattgtacaagtcctccaagaacgcctggatgacatccgtcatttttgacgaatggctgcacctcttcaacatgagaatggcggccgctaaccgcaaggtcctacttgtagtcgacaatgcttcatgccacaagattctacgaaacctgactcatgtgactgttcacttcctcccctctaacatgacatccgccgtacagccgctggatgcaggtaaacatttaatctatattgtggtgtagcctaaactaaccaactctattgcggtgttttttttattcaggtattatccggtcgttcaaggctcggtaccgaaagtattttgtgcggtagtgtttggatgcacttgaagctaacattacacgcaagctcaacgtactggaagctgtccaattttccattgatgcttgggcgggtgtgacgccaacgacaattacaaattgctgggtcaagactcgcattttgggaggaaagatgctaggaaggatccgtgctgacacggaatacattgaggaggtatccagcaacgagatggaggagttaacggcgatgctatccaggtgggagggcgctgctagcgctagtgagtatctggcagtggacgaagtcgttcctctgcacgagccagatgtgctcgtggacgaagcggcaggaagtgatgcagtttcgcaggacgagcaggaggaagaggaaaaacaggaacccgcagttcaacctgccattgctctgagacactgcatggagctggctgcatttctgctgcaatgcggagagcagactgacagagaacgaagagctttacagaccgtgaccgctttggttcgagagactacggtgaaggcagagcggcagcgaactatgcacgatttctttacgtgcaccacataattgttttaactgagtccattttatgtgagtcattgtaggagatggtcaccaacagggcctcatataaacaggtttgactgtataactggagtcaagatccctgaaaactgctttgggcttctcgttgaacgatgcgtctttgtgttcgtgcaaatcgacgccacggccgtgcattttcatccacggacaaggggtgaagatcgagatgccagagaaccaagacgtctttccgaccaagtactggggcaacatgacgaaccacgctccgtgctgtacgtcgatcaaatacgcagtgctaaacactgtgaatcactcgtggactgaggctactcagctgcaaaaagtgtgcgaccgcgcacttgccgtggctcggacacaacaatttcggacaccatcatcgtcacgcactcgatggatgctctcatgctttctggcgcaatcgcttcgggtaagtgcagcattgctccgagttcaacgtggatcagcacgggtgccccaatgagaagaagcatgggctcggactatctccaagattcctgcaagggcgagaccaacgtgatcgtcgagaagctggccaatgtcactggacgatgcccagttagcaaagccatcaggtctcttgcttacgagaacgaggagaacgcttcggtgaagctaaaccaggcgtacaaggcggcacaacgagtctatcgaacgtatgtggacgcagcaatgtgcagcttcaagcacaccggcttaatctccaactaccagtggcagttctggctgctggggagcgttgttcctcatagatctccacacaacgacgacatggtcgagttccagagctgcgccggagggatcccggaatccacgttcggcaccagatatcgcgaccgattctacgtgacaaaactcaaccacttcgacgtggctttccagagcggcgatgcactgttcgatgaggcaaaaatgcccgtaaaatggctcgagtgcttgctgtagtaatcttcggagccccaactcaaaaactaccgaagtgtgacgtaactcaagaccagatgaattgcaatgaccgacctgttatccatttcagcctgcaagtctcacgtcctgctgcgaaaccggaggtctttgtcacaagaccgctggcaaatgtggcccttgccgaggtctgtctggccttcagtgcaagtgcaacatgcaaattcactcctctttgagtgaatttgggtggaaagtatgcaagcaaagccacaggttgaagacgtgattccaaggcaaagccccagataacacctgatcggtggcaaaccgaatacttgcctctctgcgccagttttgcaacacgaaatcggccggccaccttgtggttggatgggcgggggcatcccattcgcgtagaacttgacaccaccgccggcctcactgtttcttttcgcccaccgaaccgacaactcgttctactgaacacgcagtcatgtcggcccctcttctgagctcgatagtcgctgttgtccttctgagcgtcctcccgttcacggttcgagctttccagcaggatgagtcgacaacgaattggccgtcgctccacttccggttcgctatcaagcgcgacgccatggaagtccacggccagtcggatttctccttgctggccaccccaacggtgtcgctcaaagacggcagcatcgaggtgctgtacgacacctttgccgcgttcatggaacacgagatcgtctacaactacaccctcgtgagtggcgacgcctacgttgcaggcagctatctgaacggctgcaatgcggtggtcaagtgcatggacgcagatatcctgccaccggtgaacgcgatcgtgtcggcgctgagtgaagccaagaccgtctcgagtgtgtccaccagcaatggcaccgtaatcccgtgtctccctggcaatgcgttcaaggcttcagtgaacggcatcgacttcggcgtctgctattcgggctcagcaggtttcaagatgttcggagccgacatggacatcgcagtggagtacatggagcatcacgtggatattcaggcgccgaagctgagcgacggcgtggacagcgactgcgaggagatcgccttgcccagtaccgtgtctcccattgccaagtcattcctgacgggggctgcgatctctcctgaaacctcgaggaagctggaagcggcctttgagatctcgctggaagaacagtgctcgtgcaagtcgacgcctcgtccgtgcatcttcatccacggtcttggcgtccttactgaagaggaggagaacctcgactcgtacgactactggggcagcatgacgggccacaccccgtgctgctcgtcggtcaagtacgccatgctcaacacggtgaacaactcgtggacggacgagactcagcagcaaaaagtgtgcgaccacatcctcgcagtgagcgagacgagcgagggctccacagtgtccgacaccatcatcgtctcgcactcaatgggtgggctgatggtggctggagcaatcgccaatggactttgcatgctcgactcaagcacgacgtgggtcagcacgggttcaccgatgtccgggagtatggcggccgactacttccaggaatcctgcaaggacaacaccaacctggtaatggaaaagtttgtggagaccacgggcttttgccccgcagacgaaggaatcacgtctttgacgtacgagcacgaaagctacagcaccccggagctggatgaagcgtacgaggctgcgaagaaggcgtaccgagccaatgtgtacgctgtaatgtgcagcaacagcttctcgggcatcatttcgtcgtaccaattcggcttctgggtcatggggggtgtcatttcgcacaaatcgcgcaaaaacgacggcatggtcgagttccacagctgcgctggaggcatccccaagtccaaattcggcaagagctaccgcgaccgcttctacgtgtccaagctcaaccactacgacgtcgcgttcaagaccggtgatgcgctgctggacaagtccaagatgccagtcaagtggttcgagtgtctgctgtagtagagcacgcacaaaataatagactagagcagctgataaagcaaatatgaaagtgtccgaagtgtggacactacaaagcaacaactttaggttcaggcagcgaccggttgacgcattgaaattcagcgctgacacagttgataaagctgagcagcttattacatgccagtggcacagcaatccaggaaaacgtggaatcgcagcacagccgaagattttcttggggaaatggttgcaggcgagtgtgcagcttttgactcgacgctgcgcaatgggccgtcacgccgtcactgacggccacttgacctcgactaacggtgaccacatttcgcacacagcaaccacaacaactgttcaaccgatcgcaacaactgctcatgtcgccccgtatgcattggtatcgcctagagtgagccagctcattataaaatttccacgtcaagcgagcacctcacaagaaaacatgttactacaccttttcaacttcaaaactgcaaattgtaagttcaaaacagcaaaaggtaagttcaaaactgcacgagcagagaccaggtcagcttcgtacttttatacacagctcattggttggcacgcagcatagctagccaataggcaaattgtactctataatcgtatacgatgatagatatcattcagtttgtgatatacatttatagagtattgttgttttgatcttaccttttgctgttttgaacttacaatttgcagttttgaagtcgaaaaggtgtacatgtacttagaggttctatagttgcctttgcagctttgcttccactcgctacgctagccgcatcaagtcacgagaatggttcgcccaagtttcagcagcagccccacactctctaggaacagcccgagtggccgtcattgcgcttccacttcatcatcaagcgcaagtcaatgcacgttcatggacaatcggacttcttcgtgctcgccaaccccgttcaaatggccgacaacaacactgtactctacgacgcgttcacctcattcacagagggctcgacggtgtacaactacaccgtcgtagatggagtcgcgtacagttcgcgcagctcttctggtgtcgacagcccgttggtgacatgtggagattcatctaccgtgccatcaattaactcattcgtttcagctctgggtgatttaactccagtgacggggatatcttcgagcactggcagtgtgattgaatgctccagcggcaacgcgttcaagttttcggttggtaacatcaacttcgggttatgcgcgttaggttcctcgggcttcgcaatattcggcagcgacatggccgtcactgtggagtatttggcgaaccgcgtggatattgtggcacccgaagtcaatgccgactcggaaggtggatgcaaggcagtagcatcgcccagttcgttgtcagcgctagcaagatcattgctcactggtgaggcgatttccactaactcagagcgaaagttgaaggcggagttcgacttctctctcgatgactcgtgctcatgcaagtcaaagccacggccgtgcatctttgtccacggtttggggattcgcaaagcggagccgaagaacatcaacaaacgtccaaggtactggggagatttaacggatcatgctccttgctgctcgtcaatgaagttcgcgattctcgatacgataaaatactcttggacggacgctatccagcagcaagaggtgtgcgaccgagtgctcgtggtgagcaacaccagccacggaagaacaatttccgacacgattatcgtgacgcactccatggggggacttatgatggcaggcgcgatcgcaactgggaagtgcaagctagcgtcaagctctacgtgggtcagctctgcagcgccgatgaccggaagtatgtcctccgactattttcaggattcctgcaaggacgactcaaacttcttcatggagacgttcgtggatctcacaggcttgtgccccgcaggtgacgggattcagtctctagcgtacgaaaacgaaacgtacagcaatccaaagcttgatgaagcatacgccgtcacccgggaagcgtaccgggccaatgtatccgccctcatgtgcagtaaagggtacgctgggatatattcgattgagcatttgcaataccgggtgctgggcaacgcggtcccccacaagtcggaccaaaacgacagcatggtcgagttccagagctgcgccgcagggatcccagaatcgaagtttggcaacacgtatcgtgataagttctacgcgacacagctaaaccatgccgatgcagccttcagacatggcgattcgctcgtagatgaggcgaagatgccagtaaaatggttcgagtgcttgttgtaggtcgcgaatagaataacacttgcgttggtttacatttactaggatcttgatgaattccaccagcaatctacactgtacgtacgacgatctaccgatactcacgagaaggttagcccaagactttgtcctcggaaagagacttatcacaattgatggcaatcggacgacgtttttcactcacggtagactctttttctcgtttttactacctctgagcggaaaataacgcacctagccaatcagattgcaccctgttcagaacgatacccttgtaaatccgatcgtttgaattgcgaatctcccgcccatttttctggaccgcacaacttcctctagtgctcattcgaagatctacagcctcccgctcaagacgcactctcctgcacatgaagcaagcaaccgatgaagaacggcaagcctttcgggagacgctgctccttcgcagcaccagaggtgtgctgagccctggggaaattatccagactgcagcacactttcacttaagtcgtttcgtcttcgcgcgcatttgggagagagggattagttcgatgggcgaccgcgtcgctgcagttgtcaagtccaaaaagagtgcgcgtggcagaaagaagctagaccgagcagtcctctgcgagcatgtgtcagccgtgcccgtcaacgagcgtgagaaccaccgcaagatccaacaggcgacgaatacaagttcctaccttgtccagcagttgatcaaggagggctacatgaggcgggccctgaggcacacacggcccctgcttacggcatcgcatagcgtggcgcgcctgaagttcgccgtgaaccacgtgaagctatacggagacgggcagtactatttcgacccaatgttcgacgtagtccacattgacgagaagtggttctacgtcaaaaagatcggccagcgtgtgtacgtgctgacgggcaaggacggcacgcccctggaagaatctcccatgcagtacgttcaaagcaagcgtcacatcaagaaggtgatgttcctgtgcgccgtggcgcggccacgcggcgactgggacagcaagatagggctttggcctgtcgtggaaacctacattacacaacgctggagtgtcaaccgccccgcaggtgtcgaggagatgaaaccagtctctatgaaccgtaccttggcgtgccgcatgctcgtgaccgacgtcattcctgccatcaaggcgaagtggcctcaagatcagaaggccactctcattcgcattcaacaagaaaacgcgaggccacatgtgcttgaggaggacgctgaagtgctggctgctggacgcgccgacggatggaatattcgactcaaggaccaacctgcccaaagcccagatctcaattgccttgatctcggctacttctgcagcatacagtctctccagtctcacaccagcccacggaccacggaggatctcatcaaggacgttgagctcgcgtttgcagagactacggcagagactctcaacaagacattcttaacgctgcaacttgtcatgaaggagatcatgaccaacgaaggcgcaacaactaccggctctcgcacatgcacaaggacaagctgatcaatgctggccaactccccaccactctgatgtgtgatgccgagatcctcttcagcgctcactcagcaatcgcaatgctctctgtagagcagatctacgcagagcagcttcgtgctgcccaacctcgtccggttagttgtgctggacaacgtccctccccaccgcagctgataccccagcaccagctctcgctactaccctctgcatttgagacttcagacctggatcattttcttttgtagggcacttcattaaacctctgcaaatcctatatcggtgaaaaaaaacgaggcggagctatgcgcaaatattttttgaaggtgcattattttcagcacagaggtagtacttcactggtttggttccacgtagttgatcaatatacagaagcactcgcttcgtatgcaggtcggaatgctgcttcacgcttggttcttcactgctgttttcttttctaaaatgcttgggtgcggaattgcattccatcgccagggctacgactgacgtaagctcaggcgatcctcatagtgcaaacttggccttcttgatgatgcggccgctgtctgctaacgtaatcgagcgcttcagaagtagtgatccttcggcgcatgggtccatggcgcggttctgcggggagtagagcgggaggctcttctccacggcgcacgggtcggacggactcgacgggctctgctctcccttgccgaccaccacgcagtcgtcaatccacgcagtggtctgctccacaaacgccggagatccctccacgctctggaacaggatctctgcgtcgatctcgacctgcttgttgaagtcatcgtccagcggcgtgggttccgtctcaatgagcacttcaggctcacgcacgcagatatcgctgggctcgttcacgtccgtcttcgagtggaagacgttcaccaactcgaccagagcgctcggaagcacactggtgtccacaaagggggtcatgtaggcggacagcacgtgtcttgcagcatctaaagcaacacaactgaccccatgagttcacagtgtacactactaaactaacacatgcacacaagatgcactccagcacctttcaagacgtccagcggcgtctgcagcaccgtccaccagggctggccatcgcgggccagaacgtcctccgacacgcagccttggaacagtccggcggcgaacaccgcggccctggcggccagcggcgcgtccaccgcgagacacgtccacgtgattgcgctgtcgttcaggaagctccaggccacttgcttgagcttcaggcgcagctcgttgcggcgggccgcaagggccggcagggccacgaccttgtccacctcggccgcgatataacagaacgagtggtccacttccagctcgaagccgagggccagcagcacatccccctccaactgaagaatgtcgcgcacggcctgggcctctgatgacgcagcactttgacccgcgttcgtcagctctttggctagtcgacccacgtccacgccccgggtctcgtcgttctcggccttggccgccagcagcaggcaggccgccgcggccacgcgctcgtcgcactgcgccagcgagcgccgcatcaggaagcggtgcaggaacacgcaggcgctacgatgcgtggccagcgacacgcgcagcgccgccgccagccgcgcgagcagcttgcaggcggcgccccgacgctcgagctccgccgcgagcgagacgccgtcgcggcgcgacggcgtgagctgaagctcggacgcggagaagagccagtcggtcgacatggagcctggtggggggccggggacgagccggtagcgcagcgagagaaggcagcgcgcgaggaggcggtcacgaggggctttagcgcgggcttgctcttcttcttgggctgcttggctggagtgggccggctaaggtcggccgaaaaaattaatcctcgcgtcttatcgaccaatgagatgcgagcattgtttccggcggcactggctccttgcgcgccaaaattgaatttgaatttgaagcgcctcgaacgaaattgctcgtctacaaagttcagaaaactattaacggcaccttcagcttcacctgatcttctcggcatatcctgcggctcgaaagcgaaaaatgtgtcaattatcgcagtcaacttgctcgtcccgcctgttccagcttctcctttagagccgagagctgcatcgccttggattggatgcgctggatgacctccgtcttttcggcctctatgcgatccgcttcagccagcacagcagcctccatctcggcgatctggtcctcgatcgacagctcaatggtcggtttctccattcgcagcctgcgtgcggtccgcatcatcgagaaaaggtaacgctggtcgcctaattcggctccccgccgcaagtttcctgcccgccatgccgcttgcagcagttttgctgcattttggcgagtcgacttctcccaccactccagctcaatgaggtacctcaccttcttctcgctcggcgaaagatcgagaaaattgaagaagagagattgattaagcgcgacgatcaacacaccgcagaacatcccgccagctactgagaacgcccgaccgagacatgtcaccggaaaataatcacctaatccagttccagactgcacagacacagacggttagcctgaggtaaatatcactgaggaaacacacaaccaggtgaacacttaccagcgtcacgagggtgaaccagatcgacttccaatagctgtcgaaggcagcttgaaccggccgctccagaacgcgcacaatggcagcagtcagcagcgtgttcagcactgtgagtggcagcaaaacattcaaaggatgaagcttgaaaatggacttgaagtggaagaacggcttcatggcgtccactccattcagcgatcccacaagcgagatccagggcgagtgcagggctgacgagctgcgcacgaatctcgccagcaagtacagcctcgcagccatgaacacgcctagcgcctccacagggtaccgatacaccaaatagcatccatcaccgcgcctaacagtatcaatgccttgttgcagcgactcacagaccgagtcgtcctcggcactcgcagctccatgcagctgcacgatctcaaactctccactaacacccggtggcacatggaaactgcagacaaccagctccagcgccagcaacacaggcctccagagtgaaaacttgtgtcgtctcgaggggattgagctctgcagttggttcacttggccgtcgcagcgatatctcagcaccagcagcacgtccagcagaacagtcgaccccaagacgcaacttttaagcacttgcacccatgtctcggaaggtgcggagagatcctggccgcgttcaacgatctcacactccacgagcatcagagcaatgcccagcagtccggcaagacacgatgtgagctcatagcgccggcggtgtcggaattgctggaaaaagtatcagaaaccatgctttagctggcagtgttctaacgcgtccgcagttgttgacactaagtgcctagggagcagcaccttctgtagatggagaagaaagcgggttggggggtcgtgggggctcgagttggcggcagcaggttgctcagcggcgagcgcttgcgcctccagcttcatccgtgagatattcctgtactttgttgaaactgaaaaatggtgaatggaatgcaaaacgtcaaaactatgtgtactttgtccagaatgaacaagttgaagtgaatcgcagcaggttttgctattatgcggtgatcacgcggacgccagcagcggagactcgctcagccgacagaatgtctggctgcgtgatgaacatcatgttgcgcggcaccttcatcgaccgcgacagccactcgatcatcgcaggaccgaactcgccgcgcaccgacacgaagtccacgcggatcttcgggtacatgctgtcgaacagtgccgccatctcgcggaacgaggtgagcaccggagcgaccgcctcctcgtccgagaacacgtgcacgatgcgcagtgtgtgggtctgctcgttacgacgcacgtagatgatggccttgttgatgatcgtgaggtcgggcaccttgcagaagaagacgatgggggtctcacggatgctgacaatggtgcgggcgatggtgcgtccaccgcgagcacccgtgtgctccacctccggggtgccatcgtccgccattccgatgaacgcctcctttccgaaccgcgatggggccacacttttgaggaccgctagcacaacgcggagaatcgtgactcgttcgaacatgacaaacatcaccagcatcactgcgatgaagtagatggcaaagtacatgagcaccgacgggtctccaagtaggttggcgaagatgccgaccacaacgagcaagaagcccaagatgacgacggcccacgacgcttggatatcccgaggaatctccgagcgtttacctttcagcagcatgcacgcgcatgagaacatcgccatgagacccaggaacgcgtatgtgtagactccgttaaccgtcgtagcgtccgcgttcaggatcagaacgaggctggacgacaagaagaagtagatgccgatgatgtagtggctggtgccgcggagcttgttcttcttggccaagaaggcgggcagcacgcggtcgttcgaaagtcgttcaaccagaccgcaaatgccgacgtacgaagtgagcacggcaccgcagagcacaacgaaggcatccacacatacccacgtttcgaaccagcttccaacagcgacgtggccaactctcgccagcagtgcctcgccgtgtgcgtaaatgccgtcgtcgccttcaagaggcagcaccgctaggatgccgacagccaaaccgatgttgaaaaacgtgacgagtgcccacatgttgcgcagtgtcttgcgaaacacacccggctgctgctcctccacgtagttggacgatgattcaaagcccgtgatgcccagcatggacgcaccgaagccgaagaaaatggacgtgaacacgttgctgtccagcatggagcctgcaaagtccacctcgggcagctcggttttcatgttgtccttgaagacgtatgtgtgctggacaccgtacacgatgcacgagacgaacaggatcgacagtaccagaatgtggtgcaggaagatgacaaccgccacgcgagagctctccgccgtgcccatagctgacagaagagcgaaggcgccgagtaggacgatcgtgcagctcacaatcgggatctccacttggttgttcaggtagtggacaccggaggtggccgacacgacgcccgtggccacgtacgacaagatactcagacaggcagccaccgcggcagtacgcttggaggttgtgttgagtaaagcgttgtaggtgcctccgttcagcgggatggccgtcaccacctcttcgtagatgaaccggaacgagaacagcacagccgacaccatgagcagcggaatcggcatgagcttgcccgatttcgcagcgacagacgacgccgagtacagcacactcgacaggatatcgttgccacagatagcagtcgccggtagctcgcccagaagtttgcgtggttgattcagctcgacttgaatgtcggccagctcattttgaggggcctggacgtgctccgaagtgccgaagcccgggaactgccaagccggtcctctggggccgttgtccactacctcgatctcgatcttgcgccgacgaaggttcagcgctcgcgagctgttcaccgagcagactgcgagttttggtgaagacgcttcgcggtagactgccgtgggcgacggcgccaacaacgctccagtaggattgggctccgtcatgaccgattcctgtcgaggtgaagcgcgctggaggaggacttggcttggagacggaaaaagagagaatggattcgagtccacacaagagagatctttgcaaacgatcgctgggatcagggccaacaacgactttaagtaagcgacgccctggtagagagaaccacgctttggtcgacgccgttggacgctggtgcccaattgggacggaaagttttgaatcgcctgtcctaggcagccgttggggccgtcagatcccgttctggcggaggtgaaccatttgccgatgacgttggagtctggtcggagatgaaagatgttttccccatatccccagacaccgacggagaaaccagggccttaggataagacccaccgctggagatgctcttagggacgccgtttttggttcacagggtagtatggataatacggtgacatcgaagataaagatgcaagcaaaaactaccgctgtgtaaagaggatctaggaataaatgcgttcgctctggttcattcgtctctttacgttacacgctttgtttctgtttatcacatgcctagggaccagctacgcggtgatgacccgaacgcccacagtcgacacccgctcggctgagaggaagtctggctgcgtgatgaacatcatgttgcgcggcaccttcatcgatcgagacagccactcgatcatcgcaggaccgaacggcaccttcatcgatcgagacagccactcgatcatcgcaggaccgaactcgccgcgcaccgacacgaagtccacgcggatcttcgggtacatgctgtcgaacagcgccgccatctcgcggaacgaggcgagcaccggagcgtccgcctcctcgtccgagaacacgtgcacgatgcgcagtgtgtgggtctgctcgttacgacgcatgtagatgatggccttgttgataatcgtgaggtcgggcaccttgcagaagaagacgatgggggcgtcgcggatgctgacaatggtgcgggcgatagtgtggccgccgcgcgcaccggtgtgctcgatctcggacgagctgtcggtagcgaggccaaccgcagcagccttgccgtagcgtgagggggccatcttcttcatcatcaccaaaatgcagcgcaggatcgtaacacgctcgaacatgacaaacatcacgaacatcacgacgatgaagtagatggcgaagtacatcaacaccgacgggtcaccgagcaggttggcgaagatggccaccacgaccaagatgaagcccacaatcaccgcagcccacggcgcgtggatgtcgcgcgggatctccgagcgcttgcccttcagtagcatgcacgcgcacgagaacatggccatcagtccgaggaacgcgtacgtgtagactccgttaaccgtcgtagcgtccgcgttcaggatcagaacgagactggaagacagcgcgaagtagatgccaataatgtagtggtttgttccgcggagcttgttggtcttggcgaggaaagcaggcagtacacggtccgtggacagacggcgcaccagaccacagataccaacgtacgaggtcagcacggcgccgctcagcacgatgaaggcgtcgatgcagatccacgtctcgaaccagcttcccaccgcttcccggccgaccatggcgaggaggtcgtcggagcttgcgtagatgccgcccttgccctccagcggcagcaccgcaagaataccagcgccaaggccgacgttgaagaaggtgacaagcgcccacatgttgcgcagtgtcttgcggaacacacccggctgctgctcctccacgtagttggacgatgactcaaagcccgtgatacccagcatggacgcaccgaagccgaagaaaatggccgtgaacacgttgccgtccagcatggagcctgcaaagtccacctcggggtagcccgcgtgcatgttgtccttgaagacgtgcgggtgctggacgccgtacaccacgcacgacacgaagaggatgaagagcacgacgatgtggtgcaggaagatgcccacagccacgcgggagctctccgtgatgccgatcacagcaagaactgcaaatgcgccaagcaagatgatcgtcgagcccacaatggggatgtcgacctggttgttcaggtatcgcacaccggacgtggccgacaccactccggtggccacgtacgacaagatactgagacaggcagccacggccgccgtgcgcttggaggtcgtgttcaacagggcgttgtaggtaccgccgttcatagggatggccgtgaccacttcctcgtagatgaagcggaagaagaagagcacggcggagaccagcagcaacgggatcggcatgagtttgcctgacttggcggccacggacgaagccgtgtactgaagacgcctaaagcgcttgtgcttgacacggcaaatgcagaactgagagccgaatgggaaaaagaccccgggtcgctgatggggccacttgactactgatcccatagtcacttcaagctgttctcgaacgcaggatactttttcaggtttttgtgcttgtggcacgtcacagttgaggcgggcactcatgtctcgcccatcctgcgctaaagctgacacactcgagtgatcatggaggtcacccctcctcgaatggagcttttggagcgcaagtcttgcagcgctgtttacagaagcgcatcagacggttgttagcgttgcatcatcacgagcggctcgctcccgtacagtaaaatcgtgggtgcggtgaatgtctcctaaggctcgcttcgggcagacccctctcatctgagcccgtgaattttgttttgagttatcgatgtggtgaatccatgcgggttccagcaaacaacgccagcatccggccactgcgcttacttacaacagaataattcaaagatccccaactctagttcatagcgaactcatacttgtatttacacacgctagcaattaatgctgcaactgcttgtatcatgccgtaataacgcggacaccgacggtcgacacacgctcggctgagaggaagtctggctgcgtgatgaacatcatgttgcgcggcaccttcatcgatcgagacagccactcgatcatcgcaggaccgaactcgccgcgcaccgacacgaagtccacgcggatcttcgggtacatgctgtcgaacagcgccgccatctcgcggaacgaggcgagcaccggagcgtccgcctcctcgtccgagaacacgtgcacgatgcgcagcgtgtgggtctgctcgttacgacgcacgtagatgatggccttgttgataatcgtgaggtcgggcaccttgcagaagaagacgatgggggcgtcgcggatgctgacaatggtgcgggcgatagtgcggccgccgcgcgcaccggtgtgctcgatctcggacgagctgtcggtagcgaggccaaccgcagcagccttgccgtagcgtgagggggccatcttcttcatcatcaccaaaatgcagcgcaggatcgtaacacgctcgaacatgacaaacatcacgaacatcacgacgatgaagtagatggcgaagtacatcaacaccgacgggtcaccgagcaggttggcgaagatggccaccacgaccaagatgaagcccacaatcaccgcagcccacggcgcgtggatgtcgcgcgggatctccgagcgcttgcccttcagtagcatgcacgcgcacgagaacatggccatcagtccgaggaacgcgtacgtgtagactccgttaaccgtcgtagcgtccgcgttcaggatcagaacgagactggaagacagcgcgaagtagatgccaataatgtagtggtttgttccgcggagcttgttggtcttggcgaggaaagcaggcagtacacggtccgtggacagacggcgcaccagaccacagataccaacgtacgaggtcagcacggcgccgctcagcacgatgaaggcgtcgatgcagatccacgtctcgaaccagcttcccaccgcttcccggccgaccatggcgaggaggtcgtcggagcttgcgtagatgccgcccttgccctccagcggcagcaccgcaagaataccagcgccaaggccgacgttgaagaaggtgacaagcgcccacatgttgcgcagtgtcttgcggaacacacccggctgctgctcctccacgtagttggacgatgactcaaagcccgtgatacccagcatggacgcaccgaagccgaagaaaatggccgtgaacacgttgccgtccagcatggagcctgcaaagtccacctcggggtagcccgcgtgcatgttgtccttgaagacgtgcgggtgctggacgccgtacaccacgcacgacacgaagaggatgaagagcacgacgatgtggtgcaggaagatgcccacagccacgcgggagctctccgtgatgccgatcacagcaagaactgcaaatgcgccaagcaagatgatcgtcgagcccacaatggggatgtcgacctggttgttcaggtatcgcacaccggacgtggccgacaccactccggtggccacgtacgacaagatactgagacaggcagccacggccgccgtgcgcttggaggtcgtgttcaacagggcgttgtaggtaccgccgttcatagggatggccgtgaccacttcctcgtagatgaagcggaagaagaagagcaccgtggacaccatgagcagaggaatgggcatgagcttgccagccttggcggccacggacgaggccgagtacagcacgctggacaggatgtcgttgccactgatggaggtggcgggcagctccccgagcagcttgcggggctgctccagctccttctgaatctccagcagctcgccctgcggcacctgcacgtgctcggaagagcccgagccggggaactgccacgtcgggcccttgggggcgccctcgacgatctcgatctcgatcttgcggcgccgcaggttgacggcccgcgagctggtgccggtgccggagctggggacgcgcggcgaggccacctccatgtagcccgtggccgacacctggaggctggcggtggcgcttccgccttctccagcgctaaagaccattgcgcttggacgtttggggtcgggactttcaactggacgagacgacggcgctcggacgcggtgaaaagcggaatgggtccgttgcgttgaagcgggtgggtgggtgcgtgcgtgagcgcgcttaaattccgtgatatatgaagctcagtatggccacttcaatgtccaagtcaacggcggtgagcccataaagtggcaaggacaggcgatacgtgaatggacgtcgcctcgccggatactactaaaaacgcctatatcacgccgggtcgtccctccgcggtgcacttgtttcttttgaggcgggcgtttaacacaagtcacatgtttccggctcatgacatccgtccccgctcagccgtctttggccgccacagcaactcacgagagcactgactgatgtcgggccgtacacgcgcaccacctggccgtcaaagctgaagaacgtggcggcgcggccgttcggacgagcgcggcaagctggcagtgcgggcatgctcggctcctggatgggcgaggacaagagatgtccacgtcgccccgccctcctccattacactaacggccgctctgtatgccgcggagagcatacccgccccacggacacaccagtagacgacatgggttcggccaatcccatttgacaccgttgccgaaaaagaggcgtctggttgccggaaaaggggcgtccgctgcctcgtcacatgaggaaaaatccagagccccgcgccacagtgacccagccgggcctgcgtctgcggctcacccagccatcgctgcgagcgagcgagcaactgccactgtcctgaccaggacaggcaggcctcgcggtgcaactcgacttcgcactggatccagcgagttgttccagctctggcgagaacggatccggtggatcggctagcaaccgtctccagagaacgagtctggttgctgctgtttgttgtctggccggcaagcctggccgagctcgatgaaaaaattgctggcggatttgcctccgctggctggctggctggctggagatgccgcgctcgactaagcgagataggcatccgctgccacgtctgcgagtgcaaagtgcaatgcgggacgtgcagtgggtgtgcacaaacctgcgcttcgagtcgaagccttcgactcaactccgagtgtacagccgcatcaccggcaatcctcttctttggagcgacaacggaggacaactgtttacttgggaaccaagaggaaagtttccatgggagcggttgcctgcccgatggtgagcccagccgagaacttttgtttgcccccccccccttcgtacctaccccgctaatgggaaggagggtcgacacgctccttttcgtcaggatcaggccgcgcaaacgagctgctccagaagaatgtcacctagcctgccaaaggggggagggactccctcagggagtggtgacccagcgtgatcttttgcctctgcttctctgagggctgcgccgggattggcgacgatagtactgaagtgggggatcccctgtagctgtagtgggctcttccaattactatagcccagcacccgacacccatggtgcagtggattccaccttccaacacgcttttcagtcccgctattccccattttgcggagtcgagctcaagtcgctttacgccacataaagtcaagtcaagttcctacggtactcaacaccattgctatggaatcggacagctacctcgaagtcgcgtcgccggtgccggtcatgcgcagcgcggtgaactatcgccgccgcaaagtcgagattgaagtggaggacggcccgatgcgaggccccacctggcagttcccccgctccggcacctctcagcacgtgcacgtgcccgaggcggaattggcggacattcaacacgaactggaccagccacgcaagctgctgtcggagtggcccgccaccgccatcagtggcaaacgacatcctgggaagtgtgctgtatgcagcttcatcggtggtcgccaagtccggcaagctcatgcccgtctcgctgctcatggtggcggccgtgctctacttcttccggttcatctacgaagaggtggtcaccgctatccccatgaacggcggcacctacaacgccctgctcaacaccacgtccaagcgcgctgctgccgtggctgcctgtctgagtattctgccgtacgtggccaccggtgtggtgtctcctacgtcgggcgttcactacctggacacccaagtgggcatcccgatcgtggtctgcaccattgcgctcctgttcgcctttgcgctgctggcatttgtgggcattgctgagaactcccgtgtggccctcgccatcttcttacaccacatcgtcgtgctgagtgttctggtggtgtcgtgtgcggtgtacggcatcaagaacccgcacatttttcgagacaacatgaaggcggacttcccggaggtggacttcgctgggtccatgttggacggcaacgcgttcactgccgtgttcttcggttttggcgctgccatgctgggtatcacgggtttcgagtcctcctcgaactatgttgaggagcaggctcccggcgtcttccgtaaaactctacgaaatgcagcattgccgacaacaattttcaacacgaccactgcgattggcatccttgcggtgctgccactcggcggtgacgacggaatctacgccagcgcagacgctctgctatctaaggcagcagaagtgtcgttgggaagctggttcggaacctgggtcagtgtcgacgccttcatcgtgctgtccggttccgtgctgacctcgtacgtcggcatttgcggcttggtgcgccgcctatcgaccgaccgcgtgttgccaagcttcctggccaagacgaacaagttgcgtggcacgaaccactacatcatcgggtgctactttctgttgtcgtccagtctcgtgttggtgctcaatgcagacaccaccatcatcaacggcgtgtacacgtatgcgttcctgggcttgatggcgctgttcgcgagtgccggtatgctattgaaggccaagagacccgagatcccccgcgacgtcactgcgccgtggactgtgctggtgctgggcttcgtgatggtggtggtggcgatctttgcgaacctgctcggcgatccgtccgtgctgatgtacttcgcgctgtacttcatcgccgtggccttcgtgatgttcgtcatgttcgagcgcgtcatgatcttgcgctgcattctcgcgctgatgaagaagacggcgccgtccaagtacgcgaagggcacggccgtcaactacttccgcactcgcgatacccccgaggtggagcacacgggcgcgcggggaggacgcacgatcgcccgcgccatcgtgagcatccgcagtgcgccgatcatcttcttctgcaagcggccggacctgacgatcatcaacaaggtcatcatgtacgtgcgtcgcaatgagcagacgcacacgctacgcatcgtgcacgtgttctcggacgaagagaccgacgcgcccgtgctcaaggcgttccgcaacttggtggtgctgttcgacagcatgtacccgaagatccgcatcgacttcgtgtctgtgcagggcgagttcaaacccgcggcgatcgagtggctgtcgaagaagatgggagtgccgcgcaacttgatgttcatcacgcagcccgacatggtgtcggcggcgtgtgtgtcttccgtcggcgttcgcgtcattacggcatgacccccccctccaccgtgtttcagacactcgtgatcgttttgcgtgcgtaattttcgattgctgtagggttaactttgtaatgaatagctacgtattgagtttcattcatgacgtggttggcaaacgctgctagtagtcgattttcttggtttggtggacgtcgtagacttctttatctacatctgactgaccaataacttacggtagagatttttttggtaagcggtgcactcgatgctggtttggttttgagtgctacagtagtgactgttgccctggattttcaagcttctgggtgatgttttcaacgcaagttccggtcaatctgcgtttcatttccgattcttcgtaccaagactgattcgaccacccccaggaatcgggtatgagtatgagtgctgcaaaccgacacccaggagatcgttcgcgctcgttggcgtcgtcgactgcaagcctgaggctccgcgtgatcgagattgaagtggtggaaaaggaagcgaaaagtccgtcttggcagttccccagctcaggctccacccaacgattgtgcgttcccgatgcagatcttgatggcgttcagctgaacgagccccgtgcgctcttatccgagtggcctgccagcgccatcattggcaacgacttcttggggagtgtgctctactccgtgtccaacgttgctgccaaggcggggaaactcactcctgttccgcttctcatggtaactattgtcgtgcaattatacaagctcatgtatgccgaggtgatcaccgccattccaatgaatggcggtacgtacagcgtgctactcaatgccatctccaagtccacggctaccattgctgcctgtttgagtatcctgtcctatctggccacgggggttattgcagcaatatcggccgtccaatacctcaggactcaggtgaacattccgaccgtgtgctgcacagtggctgtgctcttcgtgtttgcactgctcgctctgctcggcattgttacaagctcccgtgtggccctcgccatcttcttacaccacatcgtcgtgctgagtgttctggtggtgtcgtgtgcggtgtacggcatcaagaacccgcacatttttcgagacaacatgaaggcggacttcccggaggtggacttcgctgggtccatgttggacggcaacgcgttcactgccgtgttcttcggttttggcgctgccatgctgggtatcacgggtttcgagtcctcctcgaactatgttgaggagcaggctcccggcgtcttccgtaaaactctacgaaatgcagcattgccgacaacaattttcaacacgaccactgcgattggcatccttgcggtgctgccactcggcggtgacgacggaatctacgccagcgcagacgctctgctatctaaggcagcagaagtgtcgttgggaagctggttcggaacctgggtcagtgtcgacgccttcatcgtgctgtccggttccgtgctgacctcgtacgtcggcatttgcggcttggtgcgccgcctatcgaccgaccgcgtgttgccaagcttcctggccaagacgaacaagttgcgtggcacgaaccactacatcatcgggtgctactttctgttgtcgtccagtctcgtgttggtgctcaatgcagacaccaccatcatcaacggcgtgtacacgtatgcgttcctgggcttgatggcgctgttcgcgagtgccggtatgctattgaaggccaagagacccgagatcccccgcgacgtcactgcgccgtggactgtgctggtgctgggcttcgtgatggtggtggtggcgatctttgcgaacctgctcggcgatccgtccgtgctgatgtacttcgcgctgtacttcatcgccgtggccttcgtgatgttcgtcatgttcgagcgcgtcatgatcttgcgctgcattctcgcgctgatgaagaagacggcgccgtccaagtacgcgaagggcacggccgtcaactacttccgcactcgcgatacccccgaggtggagcacacgggcgcgcggggaggacgcacgatcgcccgcgccatcgtgagcatccgcagtgcgccgatcatcttcttctgcaagcggccggacctgacgatcatcaacaaggtcatcatgtacgtgcgtcgcaatgagcagacgcacacgctacgcatcgtgcacgtgttctcggacgaagagaccgacgcgcccgtgctcaaggcgttccgcaacttggtggtgctgttcgacagcatgtacccgaagatccgcatcgacttcgtgtctgtgcagggcgagttcaaacccgcgacgatcgagtggctgtcgaagaagatgggagtgccgcgcaacttgatgttcatcacgcagcccgacatggtgtcggcggcgtgtgtgtcttccgtcggcgttcgcgtcattacggcatgatcctcgtgcgcaccatcgatagcgaggattactttgcaatgtataagttgagtaagctaggagtaccatggtaatgtacatgcatgattgcattcagtatgtctacgcactgatgttgcttcatccgctcattgagtggcgctcaaaggactgccgatcacgctgttgtacaacatgtaatcaatgctcgagtcaacaaaggttggtccggagcttttgaatgacccgcattggcaacgcagcatccgcgcttgccgtattcaaactgtgcactctgtgttgacaaaaccgaatcacgcttagcgctggagtgcagaggctgcaagttcacagtcaccagcatgtttcgtatcgcatttcataacactgcacaagtcacagacaacttcagcttgagatgcatctctcgcagcatctccacgagagcttccagccagccagcggaggcaaatccgccagcaattttttcatcgagctcggccaggcttgccggccagacaacaaacagcagcaaccagactcgttctctggagacggttgctagccgatccaccggatccgttctcgccagagctggaacaactcgctggatccagtgcgaagtcgagttgcaccgcgaggcctgcctgtcctggtcaggacagtggcagttgctcgctcgctcgcagcgatggctgggtgagccgcagacgcaggcccggctgggtcactgtggcgcggggctctggatttttcctcatgtgacgaggcagcggacgccccttttccggcaaccagacgcctctttttcggcaacggtgtcaaatgggattggccgaacccatgtcgtctactggtgtgtccgtggggcgggtatgctctccgcggcatacagagcggctgttagtgtaatggaggagggcggggcgacgtggacatctcttgtcctcgcccatccaggagccgagcatgcccgcactgccagcttgccgcgctcgtccgaacggccgcgccgccacgttcttcagctttgacggccaggtggtgaggaaagtgtgtgcgatatccttttgttgcgtaatttggggttccaacacttctacactattcagacaattgctgtcgaatatcgtcaaaacttggaaacttccactccaagatcttcactaggacgccgtctccgataagttaagcaaatgtcctcatcattgaaggcaattccaaaccttgctgtgacgatattgtgaattccggtcaaaatttccaaatcgtggcggtttggagaccccgctccaatcgccaaatacaacactcaagtcatttgcccaatctcccgggcccaaaccatatggtccaagtgcccgcatgtcaaggccaattcgtacttaaacgggtgtctataaccaatcctagtggccccggagattggccggagatttggctcgggtggtccaacaaaccgcccatggaaatttggaacagaacacacaatactgcactgcgctgccatgctgtcgaaaccaaaagagtacgaagtcgcaaaatcattaaccaaaggacttgtacactcgtatttagggtttttgggatcaatttacttacacacatttcgggcaagtaaagacggcaatgtccaatcctgtggcaagaacacccggacggcattagcccatgctgcaaatgatccgttaaactgctcacatcaaagccgaagatgctctaaaatatcgggaggaatggcacggccggaggcgcagcctcgatgacgactaggagaggcgacatttttctcgccataccatgacggtgccgacatcggccgacagagtgcctacaagctgggattggctaaaaaagcaggcacatcatgcacatcgggcatggtgcccaggcggttagcaatcaaatgcgccactgctcctgcagtgccagagcaaatcctggattgcaggtgtcaggcagtaacagcctgacacctgcaattctgccgctgttaccaacttaagagtttgcatgttggttattaaaacagcagcattagcgctgcgtaacatacaaaaacgcaatacatttctcatttttcgagagttcatctggctgtactgtattaaaagcattgaaatttacacggttggttagcgctcgtcgccatcgatgcagcgacacagtccttctcacttttgcttttgtgctcaccccaccggcgatttgctagcgatttcacgtcagtgctaagtaagagtggggagtctttttttggtgcgcgtctatcttcacgtccggcgatatgctagaccttccacggacagagatgcaatccattgtgggtagacggactaggggcggtccaatgtgtgagaatcagagcggtacatccgagagatattctctctgtggattgtactcgatcaacaatgcggtgcaaacccggggttttttaaccgtggaggatttggtgccaatcgtgcgtcgtcttaacgcggctgcacccgaggaagaagggccaaccccccacggcgatgagaagtacggggcgtattctatgcaagcactgcatgaagcgcttcgcgccaagggctatcagctgcggtacctgaacagtaccaacacgttcaactgcagttcgcaaaggtggttcaagaagattcctaggtctagttttaggcaccttgtgatcatcagtaggccctttggccaagaagagggtacctggcactgcatcgctcgcgcggcggtgggcgacttcatcgactcggacgagctcgtctacaagccaagtaccgaagacggattacgccacttctttgctgatctgggctgtgtttacgcggtcgagccgattaactaccaacaataaaatccttcttttacacaaaaccgttgtttaatctgtaacctctgggtaatcataaaataacctttaagacaggagcagtcttatttttttacaattaaaatggctacagtaaagattcagagtggtagcacaccgcctcggctgcagtgcaagatgttgtcaaatgcatgagctgtttaagagtagatcgatattatgaagctctgtggcgttccagcagttgcgtacgaaagtcaaacgcgcactacatgctgtacgctatacatttatcgaagtgtaatgtgtagcggtacagaacatttattatagccccacgttagaaactataactcaactacttccgtgtaaacagctcttgcgtttccttgggcgctgggcccgttatgccagcgacagcaacgcgagcacggtatgcgtctactagagagttgagcttgctttcccggaaaaacttgcgcagttgcttgagtacagctgatccacgtttgctcttgactccgtgctcttcgaaaaatctgtacatcccggcttcggcctcaattccggtacggacaacttggtcggtgtagtcaggggccgacgggtccagctcgaagccgtttggtaagaagagcttcatgtagttcacggtgtgcttgtacgctgattttttctgccgatccgcacacacgtcccacatacgtggtgtttttgcgtaccactcaaaccaaatagccgctgggcctttcgggagagccttgcttccacacgacttcgatacagtagcggaatcctcgcaatgcgattgtggtgccaccaccggtgcaggcaaacttgtggaggagtcatcctgaccaacgtcgcgctgactctccagttgggtgacccgctcggtcaaggctcgattcatggctttcagctcgccgatgatgcagttctggtgattgatcagcttctcttcccttgtgaatgcctccgcgtcgtcttgagattcctccagatccttttgtgccaccttcgcctgtagttcagagctccacgcgagaacttgagcttttggtaaacccaacgccatcaggcattcgcgcatccgggtagcgtacgggcacatcgggtagtactcgagtatctcgggaaaatgctggatcagcgcggcagttagaacttcagcgacgcgggcgttgagcttcttctcggggtcttgggtgcacacgcttggctggaaaagaagattacccaagctcagtgcctgctaccggctggcggagtcgaaccaggagagggttggaaccggtggcttcttgctcgagtcccacccgctgagaacacgcgctactttctggtcttcactggtagtgttgaacacgtaagcgaaagccttgttggtagccgtcatgttccacgaaccacgatcgaaaatccactgagcactaagcagtggatcaccgtttgcatgctgagccccaccacgtcgaaacgagtgagacgtcaagtttgcagttggcaccgctttagcttgagcggcagacgctgtcttgacaacgcggttcacgtaggcgtggatcttcatgttttcttcaggcagtttacgctttttctgaggcggctcacttggcgtgtcgtcgttctcgcaggcaacaagagcttcagctagtggcacgtcaacagggactgtcatactctcgtcgctgcttgcggcaaggtgcggatgatccagcagctgtgcgcacggagcgtcctgcatcaccagggccatcgcaatcgcatgcagggggcacgtgatgaagctgttcttgtcgggaaagagagagatgccctgctcgtctgaagtcttcacgcggatgagccggacgaacacaacgccatccgcactcacagacaggtttcccttcaccacgaaccccaggtccgaggcttggccaaacgcgtaccacatcagcgccagtaacgcggcatcttggtagtccttggggctggcggcatcatagtacagtccgtccatgagaattcgtaggtcttccttcgtgcaggcaggcgccttcttgaccattccaccttcgatgcgcttcagacaatggcgctcgagcgtctgtcccatcttgagtagtttcttctcgatggtggctcggtgggtcgggtaggtgtcgagcagccagttcttgacatggcggtagtagctcatgaccgaggtcttggccagcggcttcccccctcggccttcgacgaaggcgaggtgaacgccaaagcggtccatgagcttcacaaacacagccccactctcatcatctgcgagagaggcagcgatgagtccgtggagacgccttgggccgcgacgaagcgcccgaaggcgttgattgcggtttgtagagcgcgctgggagttgacgggggcgaggtcttggaggctcatactggttccgaatgttctgtcggcaagagagcagatattcgagagatgagcagtagactggtggctcgtattgacgccctgcatattttcgcccccgtgcctacattaaacgtcggcacggcgtcggcatcgttttaccctacacctaatcaagctcattggccgatattgggtaaatctagatgtcattggtcaatatacgtgcgttgcggtcagtctgcctatactttaatcaagtaaaaaaaatgtgtcggcaccgtcacgatatttatccatatgccatcacgtttttaatcaatcaccggttaatcgagccacacacgtcttcaacacgctttcagtccgttcattccgcatttcgtcgagttcgagccaagtcgtcctcttccagtcgaaagtctaaatcccagtcgcaacggtttcaagtgctggagaaggcagctcaatgggcatccttcatgttccgaccacggtctacatggaggtggcgtcgccgcgtatccccagctccggcaccagctccagaccctccgataataccgtctccaatttacggacgtaggctctacaaataattactgcgtcaaatgcttgcatccttaacaatgagttattgtttgtcagcggtcaatactggtaaaataccagctttccaaaccgtttattacgaagtcgagttaactaccttcactaccgtgttggcgccccaaaagcgcctattctccttcaaaacgagaactgcctcgaggttcactggcaggatcccgtggcgatggtgcgagagcgtatgcttagcgcgactgaagaacctctccacgcagttcgaggttggcgggacgaacttgacggcggggaatgtcgcctgctgcttgcgctcgatcttccgctttttcatcacgcggtccgcaaagcccatcttcgctgtctgcgacggctggcatcgatacgaactgcaaacggctcaagcagcttgcgctgcttcgcagtgatgtcttcggccccggtgcgcaatgcagcgacgcatgcggcttcgaactcggggttcttgacaatatccgcgtctgcgtcaaggtagttagagaccgtagggtagatggtgatcagttcgtcgaagatatcgcgaacgtccaagagcgttacgccgttctggtgctgcagcatcttggacgcactctcaaaatctttgagctgctccagtagagcctctagcttcttcatctcgcgacgcgtcggcagcagctcagacagatcgtcgtcagcctccagaaactttttcagctcgaagaaccgagacaccatcttgaagattgacgaccagcgtgtctcctggcgtaaggcaggtcgaaggttggtgtacttcctgcaaaaataaagtacagaaattttagcggaaaataaaataccaaaaacagaggaaaataaaatactgaaaagagcgaaaacataagcaaaacttaccgaagcctcgcagcagcattcagtgtgcgcaacttacgcatcaacatttggagtttttccagctccttctcatgttttcccatgaacgcagtcaccgccagattaaggcgatgactggcgcatccgactagcggaacaccaagcaatgtcgacaccttgccgttggtcgagcagttgtcaccgaccacgtagatgatgtcgttagtcgtgcgattgaaaaagccgagaacggtcgacaaaaacgcgacatggctctccgccgtatggtcttcgacctcgtcgtcaacaataggggccatggcgagcagcacagtctcggctcggttgtcgtgcgggaagacgccgacgtactgctccgacttgaaggtgcacccgtcaaagacgatgccaaacttggcaggaagagcttcggccacatctttctctacctctccgcagacgaggcgcatgtacttcaagaatgtctccgtgcaaatggaggggatcgccatgtacttgcgcaccgtcacattctcaggaaacgagaaggggaggttgcactcgaccatcaggtctagccagttgtacaccgtttggcttttggagtccacgaaggacgtcagcgctcctgagtgagcgcttgcggccatggtggtggcgtagtcggggtgctccttgcggacatggttgagtaggttgctgtagcccgtcccccgggcctgcttgcgcacggtgccacattgacagcggaaataatcggtgggctggctggtctcgtccacaacgaccttgaagaagtaggtgcagatgctcttgctggagaacttgatgagcgacatcgtagagttggtagtggtggttggtcttgggcttcttggtaggtttagaagtgtactctgcaaaacgcgagccgtggcagcccccgggaacagtgtggtcgctagctagagctcgtggacaccgcgtccaccaccagtcaatcgaagcgatgtgaggttgcaatagaaccccatggggttctattgcaatacagttattttattacaaatgttgttgtaaatacttttacaacaacatttgtaataaaataactgtattgttttagaaaggagtaaaaataagttattgccatgaaacaataccgtaaaaattgcaatacagttatttattcggagggtctgaccagctcgcgggccgtgaatctgcgtcgccgcaagatcgagatcgagatcgtggaaggagcgcctaaaggcccgacgtggcagttccccggttcgggctcgtccgagcacgtgagggtgcctgatgcagagttggcggcaattcaagatgaaatggaccaaccacggaagctcccaggcgagctcccagccaccgccatctgcggaaacgacatcttgtccagtgtgctttactcggcatcgtcggtgacgtccaagtgcggaaagctcatgcccatacctctgctcatggtgtcgacggtgctcttcttcttccgcttcatctacgaggaggtggtcacggccatccccatgaacggtggtacctacaacgcactcctcaatacgacgtccaagcgcacggctgcagtggctgcttgcctgagtatcttgtcgtacgtggccacgggtgtggtgtctgctacgtcgggtgtcaaatatctgaacacccagatcgacatcccgatcgtcacgtcgatcatcgtcctgctcggggcgttcgccgtgttggctttcatcggtatctccgagagttctcgtgtggctgtgtttattttcctccaccacatcatcgtgctctcgatcctattcgtctcgtgcgtcatctacggtgtccagaacacacacatcttcagcgacaacatgaagaccgagctgcccgaggtggacttcgcgggctccatgctggacggcaacgtgttcacgtccattttcttcggcttcagtgcgtccatgctgggtatcacgggctttgagtcatcgtccaactacgtggaggagcagcagccgggtgtgttccgcaagacactgcgcaacatgtgggcactcgtcacgtttttcaatctggggctgggcgttggcatccttgcggttctaccacgacggtatctatgctagcagtgatgcactgctggcgaaggtcgctcgtgtggcagtgggaagctggttcgagacataggcttctgttgacaccttcatcgtactcagcggtgctgtgcttacctcctacgttggaattgttggattggttgagcgtctgtcgaatgaccgcgtgttgcctgctttcttggccaagaagaacaagctgcgcggtaccagccacaacatcatcggactctactttgtcctctcagcaagcctcgttctgatcctgaacactgactcaatctgcccgagtaaggaacgcctgatatatataaagacgcagaatatataaattgatgttaagttgattatacttttccaatgtactgatttagtaatttcaaaatgaactgaagagcagctttacctacgagtccggaatgattccaacagtggcgtatggtcgaagcactaaccttggaccaggcatcctcgcaccacaacagcgctgtcaactggtcgacctcgtagggattatctagcccttcaccttgtcgaggatgcccactttctcagaccaattgaggcggagacgcttggacggtgtggacttcatgggtggagtgggggaggaggtgggcttgtggggcgaggtgcaaaagaaaaagtgcaagtctaccactacgatacatgtagtttgaagtctagtaagatcgctaaatgcgcgccatttttcaaacgagggtggatgattggcactggatttttcacctcagtaccttgcagtaccttgcacatccccctatcgccacatcgactgaaaaataatattaaatatgtgaggctattagttatacacccgttccttattcgggcagaattctgtactgtgaacggagtgtacacgtacgcgttcctcggactgatggccacgttctcgtgcgcgtgcatgctgctgaagggcaagcgctcggagatcccgcgcgacatccacgcgccgtgggctgcggtgattgtgggcttcatcttggtcgtggtggccatcttcgccaacctgctcggtgacccgtcggtgttgatgtacttcgccatctacttcatcgtcgtgatgttcgtgatgtttgtcatgttcgagcgtgttacgatcctgcgctgcattttggtgatgatgaagaagatggccccctcacgctacggcaaggctgctgcggttggcctcgctaccgacagctcgtccgagatcgagcacaccggtgcgcgcggcggccgcactatcgcccgcaccattgtcagcatccgcgacgcccccatcgtcttcttctgcaaggtgcccgacctcacgattatcaacaaggccatcatctacatgcgtcgtaacgagcagacccacacgctgcgcatcgtgcacgtgttctcggacgaggaggcggtcgctccggtgctcacctcgttccgcgagatggcggcactgttcgacagcatgtacccgaagatccgcgtggacttcgtgtcggtgcgcggtgagttcggtcctgcgatgatcgagtggctgtcgcggtcgatgaaggtgccgcgcaacatgatgttcatcacgcagccagacattctgtcggctgagcgagtctccagtgctggcgtccgcgtgatcaccacataatagcaaaacctgccgcgattcacttcaacttgctgattttggataaagtacatcggttctggctttttacaaccacttcacattttttcagtttgcaagccgttgacccggaggtgcagtctgcagcagtcatgggcgtcacgaggcgagcgctgggggctgaggtcaagtcgctgcagtacttcctgaaccgcacggcggtgctgaaccagtaccgcgagtttctgcgcaccacgaagccgctggccgacgatgtgcggcaggacgtgcggcgccaggtgcgcgcgggcttcgatgcctaccgcaacgaggaggacgagcgccgcgtgggtctgctgctgcggcaggcgcgcgaccagctcaagatggtgagcgacctggtggacacggcggtggcgcagcagcgcagcgccgagagcaagcgcgactggaagaagggcgactgggccgcttcgaagcagcaagcgcccgctgctgctgctccggtggaggcaaaggacacgtggatggactcaccgtcggacggtgaagacggcaaggacgacgtcaagggacgagtgggcactggctggccctggaagagcgacaagggcacagacaagctcgacctggaaggcatcaagcggcgctgaccaaaagagcggagtattgcaagcgtcgctcatggcgggaggatcgtagaactcgtcttcgcgtttagatagagaaggcgtgaaaacgctcttgctgcggcgtacgcgaggtcaaaggtcaagcagtcgatgccaacctcaggttaatattaaatgctacagtacctgagaatatcgatcaaacgaaacacaaaggggcatgcagatcagcggtaatgaaataccggtacacgttcagacttccgctctgatcctgcaagttccggccgagagaagtgcgacggaggaagcgagctccgtgggtgttcttgtgctgcgagtgccatgcctgcatgaacatactaacgttttccttgtctatatattgcgcagcagtgaaagactcggcttcgtacgcagttccgaactggggaagacacctaaagtatcatcatcaacatggcgtcgtcacctgtgcactccagcggacaaacggccatcctgaaggttggtgcgacttgtcaacagagaaaaaaaagttagccgccaatggcggaacttaccgtatatcgctgcttgacgctgcagcacaccaagataacactcaacaggacgttcacgactgcgcctgtgatgccctcgctcaacgagaacctgctgcaacgggtacgtgaaggagggagagggaaatggaccatattcacactaaaaactgtcgatatttatccgacctcaggacgtgttcgactacgacttcaaccgcgagcgcatcttcctggagatcgccgtggccgagatcgccgccatgcgcaaggcgaaggaagaggagaaggcagcggctgcgagcgagagggacgactcggacgacgagcttgctcgacaggtaagctcgctctttggattatctctcatcaactactcctcacgcttgcttttgcctgggtagggcgccaagctgtcgctgtcgagcagcatgagcagcacgggacaccaggacggcacgcccaccaagccccgcagcgcgagtgaagaagacgtggcagccgccatctctgcatctctgcgcgaatactaacttgaatctcatcaactgaacgccattgtattcattctaagctggtgttgttctaccgcacggggttgtccttgtgcatcatgttgtaggccagccagtagagtcggccgtagtcgacgtagagctcctcccccggctggatatctctcacagccacgacgtcagctctgtcatcgtgcggccgcttatcgaagcgcacgttgaagcctccgcggtgtcctctgcagtcgttgatgtaccgggccagcacctcgggacagttgagtgcgtcaacgtacttgccgtcgcccagcttcatgaggtaggacttgtccggtagtttccaggcctgctggttgggcagcactacccccgtgtagatgcagacggtagaaccttcagcgtgaagcctcgtagcgaataaccccttgcccgccccagggatgttggactcgcgcacttccacgccgacgtcccgcatgtcgtgtatccatccgacgtaccccgaggttacgcacggttactatacactatctagtaaccgtatagtatacagtatgtatctagggtaacccgggtacacattggggtctcatttacgccaatccagtcaagacgaggaccaaggatgacgtccacgcgcaagttctgctgcgacgacctgttccgcttcaacaacgtcaacctggacgtgctgacggagacggtgagtctttctgctttgctgtcacgccacgcgcgcccgcgtagcgccagtattgaccgagctctgcccgtttgtcggccaccagtacaacatgtcgttctacctgcagtacctggccaagtggcccgactacttcctggtgcaggaggaccccaacaacaccatcatgggctacagtgagtcactccccttgacgctgcttcttttgtgcctctcccggctcggattgacccagtatggacctctaaatgatacctttcgtggctgtgctctgcctgattcagttatgggcaaggctgagggccaaggcaccaactggcacggacatgtgacggcggtgacggtcgcccccgagttccgccggctcggactggccaagaagctcatggactacctggagaacgtgtcggtggagctctacgacggctacttcgtggacctgttcgtgcgcgtctccaactcgctggccatcgggatgtacgagaagttcggctactcggtctatagacgtgtgctcgggtattactcaagcgcagacgacggggaagacgcattcggtatagccctgctagcatccaggaagttgcttcgtatcttttctcattgtttttattgtcggttggtgtagatatgaggaaggcgctgcctcgagacgtccacaagaagtccatcataccactgaagcacccgatcacaccagatcagctgtagcccaagagttaggcgcactgagtgaagatctttcacgtgtgagaagagggcgattgagtagtgaggtacgagaagaaatccgaattgattttgaggcagagcattcaaatgaattcgcgagacttcaaattatttgtgtggcgtttgttttacgaaggctgcaccagcgccgcagcagttgccttagaactacattgttggcgggatgaatcgagcacaaaaagcgcactatattaatctgtgttgcttctctctgagctgttgttctccaggtcttagctagcctgaggttctggattggtactgtactcgttgttcgccatgatttcaggcaaattggtgacacatatgacacaaatactgcttactcgagctcttgggccttgatgacgaacgtgcttgacacgtgggcaatgacgtcgtgggttttgccccgaggacgcctgggaggaagcgcgcgggggcgcggggcagctccgagcggttgcagttttcgccgcattttgactgttccgacaattggcgaactttcacgttcttggatctcttggacaggcatcgacgaggatcgagtgtagcgcatgaccttgcctggggtgctgatcgccgtcggaacaggaggaacctctttcatcatcgagacatctctcgtcggctcatctggacgtggcgggggaagcattctttgtcttagtccgctaggtggcggcggtggaggcattctgggtcggatctgaacttcagacgcagatgtccgctcgacctgcaggacctcagccccgagtcgatcgctcttctgggcgcgctgcagctcaagtttgtccttggacgcatcccacaacgcttcgtccacgttgcagaggatctgtcggatggcatcatagagatatcgtccgtttgccttgatcatggcgtcctggaaccattccgactgaacgcgcatgacgatctgcctcgttcgctcctcctctctgttgagactcttgtcgtcaccttgctcgttcgtctcgttgctgagatgcgtggtgctggcataggccaaaatctctctaagcaccacgccaccaacacgcctgtcttccggcaaccgcgcgttgactcgtatcacgaattccatggcgaccgcacccttgttgttaacatgtgcaggtggttcctggttgctacttgagtactcatcgtaagggtgaagctttatattctgctgggcactcaggtcgcccctcctgtccttggccatcaattcactctcgccatactttgagatcgcggcagacaccatcagcaggcccaggagttcctgctgggtgtctttactacgaacgatgcagcgcagcaccttggggctcacgatgtagttcacccaggcgtccaactgctccctcgagaaggcgctcctcgcctgaatctccttcgccagctccggttcgttgcccttgaagaagttgaggaatcgggcgtagcgctcctcgctgatacgacgaatcaccttggcacgctccacactgaaggcgtccacgtcgtgcagggcgaagttggccttgtccccggagcggcggctgtggctggtgacgtcgctaatggaccttttcgtcctcatggagccgtcgatagtcgctcgcatatccccaacgtcctccgatggcgacgacaccagcgttgaccgacgccccatcggcatcaccggtctccatacgatcggagcgtgcgccgagtccgaggccaccgacgagttaccacccatagtgtggcgccgatgcaaggacggccgaatgcccgagaaggcctcgtcgtcgtcggcgatgaccttcatcgcgactctccgactgaatggcgaatggcgttctgacaagcgagagcacgctacggtggactgttgccacctgttgagcgtcttatcgcagccctcccggagcctatccgcatgccaagttgctgctgaccatgctcctccagctggcctacatcgcacaacgctaccccgccacacgctttcgaggaccccacaatcgccgagcaaccagtcggccaggcgcggtctccgaacgatgcagcaccagctttcggcgccacaaccggcgagcaagtggccggccgttcgtacacaactctttcgtggcgacgtgaggccatgaagcacgaggttcatgaagccacaactaaatgcacttcgaaaggcctggagccatgcaagtcctctcgctggaagtggctgttaaagccggcgtgtgtgcccctcctgcgtcgaggtttcgggccatccatatccattacggggctttacatctgactcgaatggattccacgtcgtgcgtcggaatgcatagattcgagtttcttttgtgcccacccgtgtgtgctggttgcttggcaggatagagccgtcgcggctgtcacggtcatggtggccgccgctcagaaatcttgtcggccgatctccacaaccatcctgttcggaaaccagcagtgcctggcgaacccaagctcttggcaatgttcacgctgatccccaaatcgaaattcggaacgggcaaattcaaaggttcacccgccggagactatcacactgtattgactcagacgacgaacttcatggcatgacagagatcacaacgcacaaaaaggtgatccttatcgaagcggatactgtacaatgggtttgctttatccaaatgcacgctagctccttacggagacgatgagcggctattgtctgtgctggtttactagatgtacctcttcttacctttggcgtcgatgtagtacttcccaccgcgagggcccgtcaggatcacgcgttcactactatcagggttcgtagtcgaagagctggctgcattggccgcctgcgtcttgttggagcggaagcgcatgtccggcgttccatcagctttgaggcgtgctggggttgagctcaattgagagctgcttgtgtttgacttggccttgttctcgcttctgacggagtccttcggtgcttctcgactatcaggctgctttggtgtagtcttcgagccacggcctcttcggggcgtggcaactacgggagctggcggtggagagctcccattcctgctgtcagcagctactcgcagctccctgttctccttgaaccgtaggtcgggcgtattatctactttcagatgcagctccttcctgcgctccgagagcttcttcggtttgacttgagctgcatatctatcccgtctcagtatatactcgcgccgcaaaccaaccttgtccttctcctccttccagacggtggggtcagcctgctttagtcgagttcgtatgacatcgtagaggtgatcacccccaacgtcgatcatggactgctggagctcatccgactgaacttgcttggcgatttgcctcaggcgaccgcgttcttctgctgtccaagcgtacggttcactggattcactggagacttcaggatattgtcgaccctcttgtgcagcttttggctcgtgccaaccagtacatggcgcatgttgctagtatttccttgagctgttgatcgtcaactcgcttttcagggggcaactagtgcaccaactttcgaacgaagccgaggccgagtgtgtgcgcgacctgcttctcatccagataaggcaagccgctgttgtcacgtctctcctgatgtttcttcgagcgcagagcgtgtgggcggtggcggttcgtgacatagtccgtcagctcgccaagttggtacatgagagagagattaccctcatcgtagactctcagcgcgatggccacgaccaatgggtcgggcatttcccccttttcttccttcttgctgtttggcttgtagttgacgcatgacagaacctcggagcccatagtttcagcaatccactcaaccatgtcatcgcgcttgaggctgtgctttgcctcgatctctttgtataacccgctgttgtgagcggcgaagaagttgtagtaacagatgaacatgtcgtggttggcactgtcgagctctagggccctcacgactttctcgaccttcaactcactcaggtcaaagctaccagtcgaaaaaaggtcccgagcaggtgctcccccacgcttcgtcttaggtgcagccatcttggcagacgccttcatcggagctttcggctcttggcgtgatgccatcttgggctgattggatcggctttttaaacgcggggctgactgctacttgttgcgctgcaatttgacgagtgggaattggccgtgatcctagcaccctcatgtccttggtatcgacctaagaacgagagggcgattgaaataaagtcacgaggaaacagaatgactgaataggatactatcgaaatgtgaaagtattctatccttgcagtcttcgcgctacatcgcagccagaaaagtctcctcccttctctacattcatggtctataggatagcataaagatactgcgtggaaaaatcgttgtcaccaccaacacatcgcatgacctcctatttcgggatgatcgttgctgggttggcgggtgttgccttcgttctctggcgttgtgtctttaaagcatttctcgaagctttagtttgatcaatgacaaacccgagcgcatgccactacggcgttttggcgcgcgtctacgtcgaacaagacgaatggaccgaggatgaggagttcagcaagagctgcttcaagcggaacaagaaggccccgtacagaaccgacaaggacctgctgcttgcattgggggagtcgcatctcttcgcgcttcggaggagacagcaacgcacccgcgcctgtgcttgcatgtcccctgccgagctcaccctggaatgcagcagtcaacagcgactggcgagtgaattccagtgtccgcacgtgcatttgtacgacgactacgagcagtgggcagcgatcgagtactccgatatcatgcaggtgcagctcacgttcagaacagtgagtacatcgggacaaaacaatggcctggcagctcggacgaaggatttggtggtggtcatgaaggacgggagcaaactgtggatcgagttcgagcataatttgggtcggggcgcgttcttggacgcattgatggcggcatcagctcctcatatcacgcttgacctggattatactgacttggcaaagcccgacaaccagagcgagaagcccagcgatgtatcaccaaaggatccagcagaaccctcttgggaacaggtatcgccacgcatggtgtttgagttccagcgagcggcgtctcgcttggccgtgatgcttgctctcgagatcgacgccgaggatctcgacgttgcgttgtacggcgagacggagcatgaagcagcggtcactgggggactgtcaacggcgtacaccaactccggccagccatttttgagttttgagttccgacgggaagctcttcgcaaagcgatcgagactcgagttcaattggccttgcagttgtccagcgaggttgaattggacaacccgtactgccacttcttgctgggcacagctatggagttgtcacgtgtgctggatgaaccggatttgtacgcgctcacgtggttagccagcggatttatcaacctgcagcgtgcgctgatggccaccccggtcggatcgacgaagctggcgctgtcacaattggagcatgccatcaaaatctcgcgtgagcattcgctgcgtcttcagttggcgttgtctctagcgtgctgcggagacttgcttcgccttagcacgcaacgaataaccactgcgaggtcgttgctggtggaagccgcgcggctgatgccgactaacgctctggacgtggttgggaaaatgaagcttcacaataacatccaccagctcggtcttgctctgtcgcctcggaaagcaagcgacactcaagacaagaacattgtggacctgtggaaggcgctttcagcagcattgacgccgacatcccaccaaattgatcggtatccgctgttgcgccccgtgatcaaaagcagtatcgagcggtctcggtactgcttcgttgagctgcatgcagtcacagcggacaagtcagttacgccaaaccttcttcggctacgcgtctacttcactgagaactcgactttcgagtggctaagagaggaaattgctcagcgctgcaatgctgtcccgttccacgaacttgaagaagaagaagaagaagaagaagaagaagaagaggaactatcgacagtagctgaagtggtggggttttacgactcgaccaagaagaaccagcctatgatcccgtggagtgcacgattggtggacgtcgttcgcgtcgactggcacatcttacaagcggtggtgcaccacaccgttcgcccagtaacggaatctcctaacacgtcgcccaaagtcagtcttcgaagctctcgaccgacagttgtgatggtgcgatgctcgaaatgccgccagcagatgcagctgaaggacgtggaggcgcactcagagtcgtgcagctaagtaaaaaatgaaaaacatttccagcagaactaaaagtatatcgcaacaaaagtaaagtttatcgatcgagtatttatgaaattcacaatcattttgtgtaaagtttaatgaagttttgttaaaatccagtaatctggccatcctcgaaaatggcgccaacggaaatggtgcgtccgcagcctcgatccttcgctggacacgcgtgtcctgcggctcctactgccggccttctcgcggccataggctcaccagatagctgacgtcttcttctccatgttgctacctgtggccacgcctaactgtccccacagaccccgcgccgctcggtcgagtacacgcccacctaccagcgcttcgtgctcaagcaaaagtcgtacgcgcagcagttctcgcacatctacgtgagccgcctgcagcagctgcgcgacgtggtgagcgtccaggtggaggagcgcacgggcgggcgcgtgcccgtgctggccaaggtcatcgacctcaaggccgacggccgggaatgcgtgctcatcggcacgctgctcaaggtgctggaggccaagccggacctgttcgacgcgctgacgagtgagacgggcgtcacgcccatcgagaagatcgacaagtcgctggccaccgacaaggacgagctgctgctcgaggacgagagcggccgcgtgcagctcgtgggcggcatcgacgtggccaggctcgtgaccggcgtggtgctcggcgtgcgtggccgcgtgccgcgtgacggaggaggaggacagttcttcgtggaggaggtctttctgccgtccttcccgccgcaacacccgctgccggagaggcaggagagcgagtatgtggcgctggtgtcgggcctgagtattggccgcaacaaggacagccagcctctgaagaaccacgtgctggtggactatctggctggccgcctgggagatgacaaggagaaggagttcgtctcgaagatcgctcggaccgtcgtggtgggcaacgtcgtggaagccgcaggagacggagaggtccaggtgccgacgatcaagcgcaagacggcggagcagctggccctggagggggagccactgaagaatgccgacgaactggtgtcgacgctggcggcggccatgtgtgtcgatgtgatgcccggcccgtcggatccgagcaactacacgcttccgcagcagagcttccacccgtgcctgttcccgcgcagctcgcacttcaagtccttccgatgcgttacgaacccgtacgaggcacaggttggaggagttcaattctttggagacgctgggcagccgctgcacagtatgctgcagtgcactctgccaaagggtgagggcgacggggacggcgacgctgatttgacaacagacgaagacaaggagaaggctgagcaggagcgctcgctggattatctggagcggtgtgttgagtggcgccacgcggctccgactgctccggacattttggcttgcttccccatggccaacgaggaccctttcatcctcgaaacctgcccacacgtgtatttctctggcaaccagccacgcttcagcacgcgtcttgttaaaggtacggtgaagctctattaaatcatggcctggagagtatttctaacgttggtcttggttgaataggtgctaaggaccagcaagtgcgacttatcacggtaccctccttctcggagacatcgaccatcgtgctcgtagacctcaaggacctctcgtgctttcctatcacgatcggggcatgaataatactgtagacagccacgcaggacgatgaaggaaacgatgctaccgaaaagcgatgaaaagtttagagaaacaacacggtcatcttgcaagtacgagcgggtggataaagttgtacgttactacgcgtgaggtaggattgggatttacgatacctgagtcttcaacacggcacgcagacgctctggcagtccaccacaggcgttcgtttacgaggcaattaccactaagatcagcccgagctgtttgtgttgacacgaacgaggctgctacagccccgattggccttcatcagtatttgcgtacaggcagagaggtcagttcagtgctcatatggggccagaccgccttcctgttcagagatcgcatcctacagcggcgtttaacgctacacttcaactaaggagtcaagactggtgcttgggccttatccgtcatatccagattagccccggaccactcaagctactcccctcccgtcaccatgccgactcctgaagaactcctggccgtcgagcggatttcggccgaggacttggctgccgcgctgcgatcggacgccgagcacccggttgttgttgacgtccgcaacgaggactacgagctgctgggccacatcgttgacgccgagcacctgccctcggccactttcaaagaagacgccgacgtggacgcgctggtcgccaagttcggcagcaagcaaaacatcgtcttccactgcggccacagcaacacgcgcggccccacgtgcgcgttgcgcttcattgagcgggctgaggctgctggagtcaagacgcacgttcgagtgctcgctggaggcttcgccgatttcgcggaagtgcgttggcccggtgactcactgggaacaagctgtgaattaacttgggttgatgttgtgttacttctacatgcagaaattctcgggatcaacggacctcgtgacgcccccttcgaagccgacagacgccgagtaatgctacaagtaacgttgagtcgccaagaagttggctacagcgaactgatactttgaaatcgacactgaatcgcacgtcaccgtacatttcgactgaaagtttacctttaatgcatcaacgttgacttcaccgtagccttctaccgcgcatcgatgctcaattcacgccggcaggaaattacttggggttatacttgagcagccacagcccccagttgacagagaagtcgccaaaagcctccacggagcccaacgggtgcgagtcttcgggataccacaggagctgtgttggaactccgtagctcgcgatcgtcgcccgatactccaaaccttggttaggtggcacacgcttgtccttcccgcccagtccaaacagcgacggcgtcgtgaccttactaagatcgttgctcacgggcgagtgctgccacaacttgctgaggattgccaaacgcgcttcaggggtgagaggagggagctcgtccttggagttctgcagcttctgcgacgtgtgaatcgactcgaagcgctggataccagcacaggcaaggccccagtcctggatgtctgaagtgtagaacacactcgacatgttcgtgacggggttgcgcgtcaccatggacttgtagaatccagggaactgcgcgatgaggtgcgtcacgaggaacccgccgtgacttccaccagaacagtggacacgggacttatctagcgacaggccaagcctcgagctcttctccagaaggtagcacagcgcgtagtgacagtcgtacacgtcttgagtgcccaccttcccaatcagcgactccaatgccttgattccaaacccggtactgcctcggtagttcacagtgacgatggcaaaacccaaggcagcccagaagtcacacatgccacggtacatgactggcgagtttccatgcggtcctccatgcaactccagaatgacggggtagccgtcggcaggcggggaactgcttggcagcatcactgttgcctcgtagtcactggagctagacaccgacgggatcagcagattcgtcagcacagcaggcgtctcagggagcttcttctcagtagctggaacgtccgacacagacgcaggaatcgagtacacctcccagcgcttgatgtagtccgtagcccccttctggtcttcaatcgagatcgaagatccaatgtgcttaccactcgttgtgtcaatgtgcacaaggaacacgctcgcagggcgcgtaggcgaggacaccatcaccaagaagtagtcgcccttgcggtcaagcaccgtctcaatggcgacgccaagaccttccacgtactcgggagagatcaatcgctttgtcgcgacctcaacgtacttccacacctgacgcgagcccacttgggacaccacgtagatgtacttcccgtctggcgaccaggcattttcacccagtgagccagtgaacagtccgttaaacactttcgtgacgtcaagtgcagatgcgtcgggctcgtccttgatggagatcaccgtcgacgtctgcttcgtggcccagtctgtcacgcacagaaagctgcacgttccgtgggtggcaatgtctcgcgtggagaggaacgcgagctgcttgccgtccggagagaacctagggttcctcatcgttccaatctccttgctctcttcgtcctgcggggtcaattccagcttcttcaccacgttcttcgattgatcttccctgtctagcaccacatgatacagcgcgatcgggcggttatagcagtagatgatgcccagtcgcttcgggttgtccgtctcagtggctgcaaacaccagctcgttatctccgggcacaaaggccacatcagcacacgtcaagttggccggcacccccttcacttcctcgatcttccccgtggccaacgtggccaagaagatggacgctgtcttcttcccctcgtactgctcgccccagtcgtcctcgtactcgaacttggcaccagggagaggggtcatcgactcgtcattctccttcttctccttcttgctgttcacgttctcccagaacgtcggcgattcggccactttcttctcagcaacgtacgcgatggtcttctcgtcgtgcgaccaggcgatgccgccctcccgttctcccaggtagatggccccgtgcagcgtcttgggcgccttaaacgccgacaccagcttgcgatcttcaaaaactgctcaaattcagcgaaataaaggcttaaacgtcacacaaaacagcaaggaaatacttaaaaacaatggttgagagcctaccagagaaaagcccctcaggggcgccctcccccttccccttgtcgagtttgagcgtcaccacgcgcttgccggagggcgagacactcgtgtagtcggccgaccaaggggtggggaagcccgtgccgagaacctttggctgcgtctgcgtcaagtggctcacgtggtgctgcacctggtacttgtgcgtcacgttgttgaccaggtccgtcttggcccagaccagttgcaccgacgcgctgtcggaggccgcgtccacggagaggaagccgccgacgagcgccttggagcggcccacgacctcggcgaagaggccgctcacgcgcgcgtgttctgctgcgtccgatgaagccatggaggaattcaaagagctcttcggatgagatatcggataccgaaatgagggggcaatcgctttgcattcaatagggcctctattaagggcagttgattgccaatcagattcgagaacttgaccacttcaacaatggcctgtacgatcgcatggacttaaagactgctgtgtccatcaacattattagtttttatattagctttacggtcaaataaatgctacgtgcgcccccccctgcaatcaagcggagagtggcaacacgagcacatacgacgtcgatggtagctcattttgtaagtcgcagcccagcacccccatctctacatggcacggccgcgggagttgccagcgcgaccggtgcgcacggcggcagtgggtgtagcgctgctcacgatcgcacccgatcggctctgtgcgatagtgcctggtatcgggccggccgcgggagacacattcttgacaggcgacgcgttcttcacgggggacgcattcttcactggtgcggcgttcttcactggagcagcgttcttcacgggcgaagcattcttcaccggagcggccgtcttctccgggactgcacccttcacctgctgcgccttggtcttgggcgccgccgcgtccttcttgatctggacgttgttggcagccgccttcacggccaccggcgccgggggcggaacgtgcgcccacttctcgacctccacgggcaggtgcttcttcacagcctggatctgggccttgccgccagcgttcttcttcgcaggctgaggcgcctgcttctgcttctgctgcggcttcacggctttttcggccgagtttgagcgaggacggacgttgttcgcctgcagcgcaggccggtccttgccggcctcccacaccgccgcgccgccggcctgcttgagctgcgtgcggatcgcgtcgtacaggtgctggccgccaagctgctgcatggcctcctggaaccggtccgactgcacctgcctggccatctgcctcagcaggttctggttcatggtggcccagccgtccgcgtcggcggccgccgcgccaaacgcgggctgcaggcccttggtcgtgggcgtcagcacgaggcgcgcgtggccgtcgtagttcaggatctcacgcagcagctggcacgccgcgcgcttctccggcgcgaggcccagcaccagccgcagcacgaagctcatgcccaccacctgcggcacgtgctgcttggaacgcaggccgctcgtgccgaaacgcgcgccgatcacgttgtccatctcgccgaggctgtcgcgccggcccagctccttctcgccgtacttggtgagcgcggccgacacgatgagcagcacgagcagcgcctgctgggtctcctggatctcctggatgcacgtgagcgccttggggttcacggcgccgcgcacccactggtccacctgctcgcgcttggcgttggccttggcgttgatggcgcgcgccgcggcctcgtcgttggcgacgaagaagttgtggaacttctggaaccgctcgaagtccgtcttgcggatctggcgcgcgcgctgcacactgccggcagtgatgtcggtcagcgcgaacggcgtcgcgttcttggcgccgttgtctgcgttggtcttcgctggcttggcggcggcattcgcgttcgcgttcttggcgccgttgtcgttcttgttggcgttcggcttcttgccggccgacgccacctcgcgcgtcggggctgcagcgacggtgaccgcggccttgggtgcctgcgtcgccgcagccgtggccttggcgctgactggcttcacctgcgcgttagcaggagcggcggcggcggcggccggggcgttcttggcgctgttcttgccgttgttggccttctgtcgcgatgaagcgttcgtcattctcggggtgcccagggagcgcggaggctctcgaaagcttggttgtgtcgcttgttggcttggtagtcgattgcaaagtgaacgtgctcgagtacagctgagctcgacgcgagaggactcgagctcaaagctcggacccaaaccgcattggagcgtgcgtgagtttcacgagctggccgggccgggccgggccgagccgacaagagcggtgacgtgcttctcacctacgctggagggattcgactaaggtggcgaagcgaagccgtgcgagggcgaccaagttggaagcacaacgccgcactattttcggcttcagcctgacgtagtcaccatctaagttggggtgtgtgaaactcgggatctcgatcgtgggatggcgattagatcggatcctctgctaacgagtgtctgtagtgccttgtcgcgagcgtttgtgttggggaccagcccaaaataacaaaacagctactaaacttcaacttgtagcaattgtaggcaacttcaacttgaggccccaatcaagtgatgtgggtactggcagcggaaagaccaaccgagcacatccaactacgggcctgcgccgcttgtgaatattggatacggtaacacgcgcaagtcaatggatcgatctattcagttggcagagttccgatgatcgatatgcgtcctcacacagcgcgcaaaagcagacaagcatagctaaaaagtgttgattgtatccgtacaattggaagcaaagctagcgctgcactcggaaacgcggcggccgcaggtgaacagacggatacaaatgcattcgtagactggtgtgtccatcaacattattagtttttatattagctttacggtcaaataaatgctacgtgcgccccccctgcaatcaagcggagagtggcaacacgagcacatacgacgtcgatggtagctcattttgtaagtcgcagcccagcacccccatctctacatggcacggccgcgggagttgccagcgcgaccggtgcgcacggcggcagtgggtgtagcgctgctcacgatcgcacccgatcggctctgtgcgatagtgcctggtatcgagccggccgcgggagacacattcttgacaggcgacgcgttcttcacgggggacgcattcttcactggtgcggcgttcttcactggagcagcgttcttcacgggcgaagcattcttcaccggagcggccgtcttctccgggactgcacccttcacctgctgcgccttggtcttgggcgccgccgcgtccttcttgatctggacgttgttggcagccgccttcacggccaccggcgccgggggcggaacgtgcgcccacttctcgacctccacgggcaggtgcttcttcacagcctggatctgggccttgccgccagcgttcttcttcgcaggctgaggcgcctgcttctgcttctgctgcggcttcacggctttttcggccgagtttgagcgaggacggacgttgttcgcctgcagcgcaggccggtccttgccggcctcccacaccgccgcgccgccggcctgcttgagctgcgtgcggatcgcgtcgtacaggtgctggccgccgagctgctgcatggcctcctggaaccggtccgactgcacctgcctggccatctgcctcagcaggttctggttcatggtggcccagccgtccgcgtcggcggctcatgcccaccacctgcggcacgtgctgcttggaacgcaggccgctcgtgccgaaacgcgcgccgatcacgttgtccatctcgccgaggctgtcgcgccggcccagctccttctcgccgtacttggtgagcgcggccgacacgatgagcagcacgagcagcgcctgctgggtctcctggatctcctggatgcacgtgagcgccttggggttcacggcgccgcgcacccactggtccacctgctcgcgcttggcgttggccttggcgttgatggcgcgcgccgcggcctcgtcgttggcgacgaagaagttgtggaacttctggaaccgctcgaagtccgtcttgcggatctggcgcgcgcgctgcacactgccggcagtgatgtcggtcagcgcgaacggcgtcgcgttcttggcgccgttgtcgttcttgttggcgttcggcttcttgccggccgacgccacctcgcgcgtcggggctgcagcgacggtgaccgcggccttgggtgcctgcgtcgccgcagccgtggccttggcgctgactggcttcacctgcgcgttagcaggagcggcggcggcggcggccggggcgttcttggcgctgttcttgccgttgttggccttctgtcgcgatgaagcgttcgtcattctcggggtgcccagtgagcgcggaggctctcgaaagcttggttgtgtcgcttgttggcttggtagtcgattgcaaagtgaacgtgctcgagtacagctgagctcgacgcgagaggactcgagctcaaagctcggacccaaaccgcattggagcgtgcgtgagtttcacgagctggccgggccgggccgggccgggccgagccgagccgagccgacaagagcggtgacgtgcttctcacctacgctggagggattcgactaaggtggcgaagcgaagccgtgcgagggcgaccaagttggaagcacaacgccgcactattttcggcttcagcctgacgtagtcaccatctaagttggggtgtgtgaaactcgggatctcgatcgtgggatggcgattagatcggatcctctgctaacgagtgtctgtagggcccgtgtcccatgcgtttatgattggtttgcttcccttagcagagagatcatcacaactttgttttgctacgattgtctgcttttgcgcgctgtgtgaggacgcatatcgatcatcggaactctgccaactgaaaagatcgatccgttgacttgcgcgtgttaccgtatccaatatttagaagcggcgcaggcccgctgacacacgcagttgaatgtgctcggttggtcttttcgctgccagtacccacatcacttgattggggcctcaagttgaagttgcctacaattgcctacaagttgaagtttaccagctgttttgttattggcaacccggagagttgctcttggagggtacacaggtcggcgaatagtttcatggacgatgataacggataagaattgagtaaatcccagtgttgtttttaatccttgtaaggattttaaaagagcactaccagccgaactctctagtcgattctaacgttggcatctactgcgcctgcttcgcagccgcagcatctgcccgggaataacaccctggtcagcgtccaatcgctgcgttgacgccagcaacgagagagctatttcattcagtttgcaggtaaggtatactgtgctcatttagtactgtgttgtttgctaacgatcagatgagagagctagcggaacgaaggagagatgcatggtgcgctgatcttgaccttttaacttgagggtaaattgcggaatgaaaaatacgttaatgtgccaagtccttggaagtgggcgcttcaacgcaggtaaagaaaccctaattcaaacgaacgatgctcgtgtcaccgtcgagttgagcggttggtttggcgagagacacgaggttgggcatcttcggctaagtgattgagtattgagcaaattgacatgtaaaaaatgcagcctgcagctagaaaagtcgtattggtcatcttcagctaagcttggtcgattatggcgcaaattgatacgccttcagcgaggccatgacactctcatagtgtactggaacgtacgtaagtgtttgaccgcaggttttggtaacgaatgaacgattagtaccaacctttggtaaaaaatgtgcataattatcgacgggtacccgattccggcagatattagcttaaacattacaattaagaaagagagacccggtttggcacccggttttggaaagttacaagtttttgccgggaccaagcacaggtcttcgacctgtgaattttgggcttgtccccaacacaaacgctcgcgacaaggcactacagacactcgttagcagaggatccgatctaatcgccatcccacgatcgagatcccgagtttcacacaccccaacttagatggtgactacgtcaggctgaagccgaaaatagtgcggcgttgtgcttcctacttggtcgccctcgcacggcttcgcttcgccaccttagtcgaatccctccagcgtaggtgagaagcacgtcaccgctcttgtcggctcggctcggctcggcccggcccggcccggcccggccagctcgtgaaactcacgcacgctcccatgcggtttgggtccgagctttgagctcgagtcctctcgcgtcgagctcagctgtactcgagcacgttcactttgcaatcgactaccaagccaacaagcgacacaaccaagctttcgagagcctccgcgctccctgggcaccccgagaatgacgaacgcttcatcgcgacagaaggccaacaacggcaagaacagcgccaagaacgccccggccgccgccgccgccgctcctgctaacgcgcaggtgaagccagtcagcgccaaggccacggctgcggcgacgcaggcacccaaggccgcggtcaccgtcgctgcagccccgacgcgcgaggtggcatcggccggcaagaagccgaacgccaacaagaacgacaacggcgccaagaacgcgacgccgttcgcgctgaccgacatcactgccagcagtgtgcagcgcgcgcgccagatccgcaagacggacttcgagcggttccagaagttccacaacttcttcgtcgccaacgacgaggccgcggcgcgcgccatcaacgccaaggccaacgccaagcgcgagcaggtggaccagtgggtgcgcggcgccgtgaaccccaaggcgctcacgtgcatccaggagatccaggagacccagcatcaagaaggacgcggcggcgcccaagaccaaggcgcagcaggtgaagggtgcagtcccggagaagacggccgctccggtgaagaatgcttcgcccgtgaagaacgctgctccagtgaagaacgccgcaccagtgaagaatgtgtcccccgtgaagaacgcgtcgcctgtcaagaatgtgtctcccgcggccggcccgataccaggcactatcgcacagagccgatcgggtgcgatcgtgagcagcgctacacccactgccgccgtgcgcaccggtcgcgctggcaactcccgcggccgtgccatgtagagatgggggtgctgggctgcgacttacaaaatgagctaccatcgacgtcgtatgtgctcgtgttgccactctccgcttgattgcagggggggcgcacgtagcatttatttgaccgtaaagctaatataaaaactaataatgttgatggacacaccagtctacgaatgcattcgtatccgtctgttcacctgcggccgccgcgtttccgagtgcagcgctagctttgcttccaattgtacggatacaatcaacactttttagctatgcttgtctgcttttgcgcgctgtgtgaggacgcatatcgatcatcggaactctgccaactgaatagatcgatccattgacttgcgcgtgttaccgtatccaatattcacaagcggcgcaggcccgtagttggatgtgctcggttggtctttccgctgccagtacccacatcacttgattggggcctcaagttgaagttgcctacaattgctacaagttgaagtttagtagctgttttgttattttgggctggtccccaacacaaacgctcgcgacaaggcactacagacactcgttagcagaggatccgatctaatcgccatcccacgatcgagatcccgagtttcacacaccccaacttagatggtgactacgtcaggctgaagccgaaaatagtgcggcgttgtgcttccaacttggtcgccctcgcacggcttcgcttcgccaccttagtcgaatccctccagcgtaggtgagaagcacgtcaccgctcttgtcggctcggctcggctcggcccggcccggcccggcccggccagctcgtgaaactcacgcacgctccaatgcggtttgggtccgagctttgagctcgagtcctctcgcgtcgagctcagctgtactcgagcacgttcactttgcaatcgactaccaagccaacaagcgacacaaccaagctttcgagagcctccgcgctccctgggcaccccgagaatgacgaacgcttcatcgcgacagaaggccaacaacggcaagaacagcgccaagaacgccccggccgccgccgccgccgctcctgctaacgcgcaggtgaagccagtcagcgccaaggccacggctgcggcgacgcaggcacccaaggccgcggtcaccgtcgctgcagccccgacgcgcgaggtggcgtcggccggcaagaagccgaacgccaacaagaacgacaacggcgccaagaacgcgacgccgttcgcgctgaccgacatcactgccggcagtgtgcagcgcgcgcgccagatccgcaagacggacttcgagcggttccagaagttccacaacttcttcgtcgccaacgacgaggccgcggcgcgcgccatcaacgccaaggccaacgccaagcgcgagcaggtggaccagtgggtgcgcggcgccgtgaaccccaaggcgctcacgtgcatccaggagatccaggagacccagcaggcgctgctcgtgctgctcatcgtgtcggccgcgctcaccaagtacggcgagaaggagctgggccggcgcgacagcctcggcgagatggacaacgtgatcggcgcgcgtttcggcacgagcggcctgcgttccaagcagcacgtgccgcaggtggtgggcatgagcttcgtgctgcggctggtgctgggcctcgcgccggagaagcgcgcggcgtgccagctgctgcgtgagatcctgaactacgacggccacgcgcgcctcgtgctgacgcccacgaccaagggcctgcagcccgcgtttggcgcggcggccgccgacgcggacggctgggccaccatgaaccagaacctgctgaggcagatggccaggcaggtgcagtcggaccggttccaggaggccatgcagcagctcggcggccagcacctgtacgacgcgatccgcacgcagctcaagcaggccggcggcgcggcggtgtgggaggccggcaaggaccggcctgcgctgcaggcgaacaacgtccgtcctcgctcaaactcggccgaaaaagccgtgaagccgcagcagaagcagaagcaggcgcctcagcctgcgaagaagaacgctggcggcaaggcccagatccaggctgtgaagaagcacctgcccgtggaggtcgagaagtgggcgcacgttccgcccccggcgccggtggccgtgaaggcggctgccaacaacgtccagatcaagaaggacgcggcggcgcccaagaccaaggcgcagcaggtgaagggtgcagtcccggagaagacggccgctccggtgaagaatacttcgcccgtgaagaacgctgctccagtgaagaacgccgcaccagtgaagaatgtgtcccccgtgaagaacgcgtcgcctgtcaagaatgtgtctcccgcggccggcccgataccaggcactatcgcacagagccgatcgggtgcgatcgtgagcagcgctacacccactgccgccgtgcgcaccggtcgcgctggcaactcccgcggccgtgccatgtagagatgggggtgctgggctgcgacttacaaaatgagctaccatcgacgtcgtatgtgctcgtgttgccactctccgcttgattgcagggggggcgcacgtagcatttatttgaccgtaaagctaatataaaaactaataatgttgatggacacaccagtctacgaatgcattcgtatccgtctgttcacctgcggccgccgcgtttccgagtgcagcgctagctttgcttccaattgtacggatacaatcaacactttttagctatgcttgtctgcttttgcgcgctgtgtgaggacgcatatcgatcatcggaactctgccaactgaaaagatcgatccgttgacttgcgcgtgttatcgtatccaatattcacaagcggcgcaggcccgtagttggatgtgctcggttggtctttccgctgccagtacccacatcacttgattggggcctcaagttgaagttgcctacaattgctacaagttgaagtttagtagctgttttgttattttgggctggtccccaacacaaacgctcgcgacaaggcactacagacactcgttagcagaggatccgatctaatcgccatcccacgatcgagatcccgagtttcacacaccccaacttagatggtgactacgtcaggctgaagccgaaaatagtgcggcgttgtgcttcctacttggtcgccctcgcacggcttcgcttcgccaccttagtcgaatccctccagcgtaggtgagaagcacgtcaccgctcttgtcggctcggctcggctcggcccggcccggcccggccagctcgtgaaactcacgcacgctccaatgcggtttgggtccgagctttgagctcgagtcctctcgcgtcgagctcagctgtactcgagcacgttcactttgcaatcgactaccaagccaacaagcgacacaaccaagctttcgagagcctccgcgctccctgggcaccccgagaatgacgaacgcttcatcgcgacagaaggccaacaacggcaagaacagcgccaagaacgccccggccgccgccgccgccgctcctgctaacgcgcaggtgaagccagtcagcgccaaggccacggctgcggcgacgcaggcacccaaggccgcggtcaccgtcgctgcagccccgacgcgcgaggtggcatcggccggcaagaagccgaacgccaacaagaacgacaacggcgccaagaacgcgacgccgttcgcgctgaccgacatcactgccagcagtgtgcagcgcgcgcgccagatccgcaagacggacttcgagcggttccagaagttccacaacttcttcgtcgccaacgacgaggccgcggcgcgcgccatcaacgccaaggccaacgccaagcgcgagcaggtggaccagtgggtgcgcggcgccgtgaaccccaaggcgctcacgtgcatccaggagatccaggagacccagcaggcgctgctcgtgctgctcatcgtgtcggccgcgctcaccaagtacggcgagaaggagctgggccggcgcgacagcctcggcgagatggacaacgtgattggcgcgcgtttcggcacgagcggcctgcgttccaagcagcacgtgccgcaggtggtgggcatgagcttcgtgctgcggctggtgctgggcctcgcgccggagaagcgcgcggcgtgccagctgctgcgtgagatcctgaactacgacggccacgcgcgcctcgtgctgacgcccacgaccaagggcctgcagcccgcgtttggcgcggcggccgccgacgcggacggctgggccaccatgaaccagaacctgctgaggcagatggccaggcaggtgcagtcggaccggttccaggaggccatgcagcagctcggcggccagcacctgtacgacgcgatccgcacgcagctcaagcaggccggcggcgcggcggtgtgggaggccggcaaggaccggcctgcgctgcaggcgaacaacgtccgtcctcgctcaaactcggccgaaaaagccgtgaagccgcagcagaagcagaagcaggcgcctcagcctgcgaagaagaacgctggcggcaaggcccagatccaggctgtgaagaagcacctgcccgtggaggtcgagaagtgggcgcacgttccgcccccggcgccggtggccgtgaaggcggctgccaacaacgtccagatcaagaaggacgcggcggcgcccaagaccaacgcgcagcaggtgaagggtgcagtcccggagaagacggccgctccggtgaagaatacttcgcccgtgaagaacgctgctccagtgaagaacgccgcaccagtgaagaatgtgtcccccgtgaagaacgcgtcgcctgtcaagaatgtgtctcccgcggccggcccgataccaggcactatcgcacagagccgatcgggtgcgatcgtgagcagcgctacacccactgccgccgtgcgcaccggtcgcgctggcaactcccgcggtcgtgccatgtagagatgggggtgctgggctgcgacttacaaaatgagctaccatcgacgtcgtatgtgctcgtgttgccactctccgcttgattgcaggggggggcgcacgtagcatttatttgaccgtaaagctaatataaaaactaataatgttgatggacacaccagtctacgaatgcattcgtatccgtctgttcacctgcggccgccgcgtttccgagtgcagcgctagctttgcttccaattgtacggatacaatcaacactttttagctatgcttgtctgcttttgcgcgctgtgtgaggacgcatatcgatcatcggaactctgccaactgaaaagatcgatccgttgacttgcgcgtgttatcgtatccaatattcacaagcggcgcaggcccgtagttggatgtgctcggttggtctttccgctgccagtacccacatcacttgattggagcctcaagttgaagttgcctacaatagctacaagttgaagtttactagctgttttgttattttgggctcacgactcgtgagtcacgacaagggcactacgtatgtggggatccgggattgagcacttgggcaattcggttatcactacgtagttcacggggttgtgtcgtggtagaagtcgaaggttctggacccactgattcgtttgtagagtgtctactcggtgcgaactgcacgctaccaacgaattcagcactactttgctagttaaaactaaaacaaggtgggcagttgctgttttttcttccgatatttgggaaaactgtaccgtgcgccttggttaagtgggcagtaccgcatcacgccgggagaacgatgagacacaaagtgggctcaatacactgtactgtaaaagcctccgcgaattaaggtgttgtctccagcaagattaatgccaatgcgtgccaccagtgcatagagagatagcagccaccgcgtttggtgccggtgttgaaatcgtcttggtcgcgctgcccaatgattgtgccaccatgaaaaggtcgacccgatgtcatgtgcctaaacttcagtcaggagatccgtagagtagcggcatccactgcgagtagcgagagcctctcaccgagaggagaggaaaggatcactgcgtcattgctcgcatccatacgaatcgtccagcaaaggtggccacttcactcaaagtggacgattggcggtacgtactgaataccgtcctctgattggtcaatacgtgatcccaatcaagtcagcgaagatatgtcgggatccgcaatgccggatacggagctggaggtccgttagtccagtgtcggcattagtgatggttctgaattggacgagtaaagaacgtccaaaacgtctaaaacgttctaaacactttagaagtgtccaaaatgtccaaaagtgtctaaaagtcagtacctcgaacttgatgtgcgatcttccctcttccctccctctgtaaatctccctcactgcaagacattcccctccatgaacaccttgccacccgacggcgctcctgaaactgcatcttgcctgcgaacctgccgaacgcctccccagcgcctatttccagtcggcaagcaacaccagcatcaagtgacaactttacatcgccgcaagtaaccacgcgtagtgcgcaggggatccgttccggctctgcgttgcgacgttctcctcgctacagcccctaccatggcggaacttctacctccagcccgtctctaaggcacatgcgatcgcctacgccaacaagacgcgttaacttctcgccaccaccttcgttgcgacgaacgggagcttcgccaacccgaatggggcgccctcgagatgaaatctcgcagcattacgacattgagagagagaacggaaaaaacacggtcgttgcaagtattgcggtactttgaagaaaaatggcaagcccggcggcaacctgctaaagcatctaacgcagcccaagcagtgccctcgtgtcccccgtgatgtgcaaatttctctgcgtcccgcacctcccgagcctgctcaagcccctgctcaagccactgctcaggctcaagaacgcgaccagacagtccgatctactcaaagcgggttgacgcaagacgccttcgaattggcgctggcgaaagtttttttgtttgcgcacttccttttattctcctggaggccccaatatttcgtgaatttctcgctatgttggcacctacaatgcaaataccatcgcgccataaagtgagcggagtgttgctgaaacgggtgcgagatcagcttcgccggagccatgtcatcgagctgatcaataaacaagtctacgtctcgctcgtcaccgacggatggagtgacaccaacagctcgagtataatcaattttatggtggttgcacccgggataccgtccgtcttttggtcgtcatggtctaccagatccgagcagcacacggcaagatatatcgctggcgaaattgacaaagttatcgaggaaattaaacgtgatactacagcccaagtcgttgctattataacagacaacgcgcaaaatatgaggagcgcgtcggctagcgtacagggcagacgcccaaatgtggtgagcggtggctgttcggcacacgtactgaatttattggtgcaagacgtgtgccaattttctgccattaaagcgatcctgtcgagagctgtcaccctgacacgctttattcgagaccaccttgccttacatgacgagttcaagcagttgaagaaagaaacccgcgaatcagggattaaaacgcgcaatctcgtgctaccaatgccgacgcgatggtactcagtgcatgcctgtatgcggagtgtgctgaacagccaggacatattcgagaaattgtttttgagtcctgagtacgatcgatttcttgatcgctatcgtggaaccgcggcaagtcggaagaagcttcgctatatcacggagctcatccgcgataacgggttttggagtagcttgaggacagtagtacgccttctcgatcccatcattacggcgctccgggcattagaaacagacaatacgtttgtgtcgggtgtgtatcggtggttccggtggcttcgttatcattcggcttacggcgtcacgtcacccgacgaagaacagcaggatgatgcggcgggtccaccgacggagccgcagaatcgcgtggtggagcggcagaacaacagagaagcgcatggacctgcgcgagatggaatcgaacttctgagcgacacagtagagcgcataactcccaccagcagcgctgacaatgagcttcaaagtgtattggcagaggatgaaagcatccttactggagatgactacaagaaggttgcaactttatcgctcgtcgagttgcaaggctgctttcgtgaaaagatcaagaagcgctggacgtacgtgcacaccaacgcaatgggcattgcattcatgctcgatcctgctacggatcttgacgactttgttggcatggacagcgagaaggtagatgaccaagcctgccaaatggcggtacgttgcggcatcataacggcagtggatatacctaagctaaccgcggagattcttgagttcaagactgaaaaacggcgtggtggtgaagctgagcgggtaaagttttctgagtcaagtccgcagtactactggggctcgaagagtgagaagaagtctttccggtacccgtagctgatattgtattcgcgattcctacttcatcggctgcgagcgagagagcatggagcatatttgatcacattcactccaaaaggaggaatagactctccgtagaaaaggtcgagatgcttgcattcatctacatcaattatggcatcattgagagcgatgaactcgatcttgcgcgtcatcaatcgcgcccagagagtgtagaagtcgacaactaatctttaatacattgtgtgtttggttttactttaggtcttcatataccttctcttcaacatagaactcttggtggtattgatctgggcctgcacgtagctgctggcgtactacgcactgttctgctgcggctttcggttgtctttgacgaagcgacgcgcttgcttctggataagctcggctgaagccaccgcacaggtctggatgtccgcctcaatatctgtgccttgtccgcccgcagcctgcgcttctcgaagtaattgccattgagatacttcgtctgatgctcgctcagctccacgttgacggccaggtgcttgaggtacgtcgacggcttgatcgcggactcgtcactcgcgacccgcttggtctctccctcgaggatcgtcacagtgcacctcgggcgcttggacgtcgtgtcgccgaccacctcgacaaccacagcgccgtcacccacgatgaacatagtgtagccagcgttcctaatgtcgcgctgtgcgcctgcggggtaatagtactacttgctcttcatgagcacgagcacgtcagtgccatccttggccgtgaggacggccgtcaacgcctaagccacgcttgagtatgccgcgcagcttgatgttccccacgacggtgcggtgggtctcctccttctggcgctcggcaagctgcttcactgagagagcctctccgcgtcgttgtcgctggcgcggtcgccctgcagccggtcgtccgttcttcctcgacgtcggtcaccttcgtgtgctggtgtccagctcgtcttcagggcgcttacggtggctcggctgggccttccggtacaggtctaacgcgcgggcgtctctgtcgatgttggggctcgtgctcagcagctaacggagctgtaattggcatgggctcgtccgcagagggaatctgcagcggcgtctcgttcgaattgggcaccagcggtggcttcttcggatgcgaaggcgcagttgtgcctctggttgagaatcaatcccgagtattctttctgacagttttggatacatttggattttggacggaattttggacgttttccaaagtattctgaactattctgaagtcgtccaaaaccatcactagtcgccacttggccgccacagccccaacgtagctccccactgtcgcaattcccgcaatgctgaggaatgccaaagcctcggactccgacgtccccgcattagacgtggcactatccgtaaacgatgtcgccgaggcgcagccgttagtggcgcgcgacagcgacgacagcagcaagcaccacgcagccccatgcagcgtctgcgcccaccaaggtcctgttgctcgacggcgtgcgcgggctcgcggcgctcatggtctgcacgtcgcactcgaaggagtacatggtcgacatcgacctgggcgccatcgccgtagacgcgttcttcgtgctctcttcgttcctgttgacttggctcttcatgaagaagagcatccgactgttagcccagcgcgcgagcgtccgcaagtggatgttcacgctggccgactacttctccaagcgcttctgtcgagtctacccgctgttcgcactcacgagcgtcgtgatctggctgctgcccgctgacgccaagaagcgctactacttgatcgagaaacccgagagcttcgacctcttcaaggtgctcccgttcgagttcgactaccggtactttgtgttctggacgctgccgctccagatcacgtactacttcttcatcccagtgttcgtgctcggagtgctcgcgctgggtcacttctggttcgtcccgttcctcccggcgtactactggatcgtcaacgaaggctggtaccagttcagaacgagccacatggagctgcgtccccacttcccgactttcgtcgccggttccatggctgcggtcattttcgtcaagatcgacacgtggatcaagacgacgggcttcgagttccgtcggtggcacgtgctcgcaatccgtgtcgtcgagtacatcacatttgcagtgttcctgagcatcacattccacggcctgttcttccactgggtgcataagaacccggccccgaacgagaaggggttttcgtttatcagtgtcccgctgacgctgctcttcgtgatcgagatgatcctgccgtcctgcgtatccagtatcttcgagtggagcgtgctgctggggcaagatcagcttctccgtgtacctgctgcacagcttcgtgtcgtacgcgtacgtgatcggctcgcagccgaactggtacgacaaggtgttctcccgcttcgggttgattttgctgctgtcgacgatctcctaccacttggtcgagtatccgtcccagttgctgtcccagcgaatcaccaaggcgttggccgagcaggagaagaagggctccggcggagcttcggcctgcatgggagggtggcccaacccggcccgagtgctagcgaaccgagtggcctgggcccaggaggccaagtcctcggccgtcatcaagacggtgctccggatcagaagcagctcaatgtcgctggtgcagggcaagccccacgagtccacggcgtgagcgtctgcgtgtgtgtacatatatgtagtgtagcttggccgccgtgacgtgtagctgtagcaaagacaacaagacgcagttgaacacactcgctatcgtcgtagcggagcccggcggtaagtcacccgtagcgtgagccggtaccgatgttgcgccggacttgtgtcgaaatcgactaattgtcgcgggtcgcaggaagcgtccgcgtggagtgtactgttcagtagggcggtgtcatcttggctgggtgagctgaagcaattgtgcgctgtccattttccagtgccacgcacgacggttgtccggtgcccatcagcgcaggaaggatcgagcaagagcgccgccgagtgcgagccacagatatgcgggcagatgcacgcgaaagacgtcgtctggttgaggtagaggcggccccgcacttgggttttgtatgagtcccaatcccgggatttatatctgaagccacctgtggtcatcttgggtgctcggacagcaaccgggcatttcgtcccgcgccaggccaagccgcattgctgaaaccccccgaaggttaattaggtcgcccccatgctgcgctcgcacggacccgatgccgacggcagcggcaagacgcaggccgaggacgtggccgtccacgtgcagtcgacgcccgaggaccagccgctgttgaacgacgacgagcaggacaaggacaaggacaagaagcccgtgaaggccaagaaggcggcggtcgcggtcgcgccgcccaccaaggtgctgttcctggacggcgtgcgcgggctcgcggccatgctcgtggttacgcagcactcgcacgagtacatgcaggacctgaacctgggcgccgtcgcggtggactcgttcttcgtgctgtcgtcgttcctgctgacgtggctcttcaccaagaagaccatccgcatgatgaaccagggcgcgggcgtgcgcaagtgggtcttcgcgctctgcgactacttctgcaagcgcttctgccgcgtctacccgttgttcgcgctcacgtgcgtggcgctctggttcatggacgacgaggccaaggagcgctacttcctcatcaagcagcccgagaacttcgacctgtacaagacgctcacgttcgagttcgagtaccgctacttcgtcttctggacgctgccgctcgagatctcgtactacttcttcatccccgtgttcgtcgtgggcacgctcatgctgcgcaagttctggtgggtgcccttcatcccggcctactactgggtggtcaacgaaggctggaacgactaccgcacgagccactcggtgctgcgtccgcacatcccgacgttcctggccggatccatggccgccgtcatcttcgtcaagctcgacacttggatcaaggccagcggcttccagttccgcctgctgcccaaactgctcctacgcaccatcgagtactcggcgctggctgtgttcctgagtatcgccttccgtggtctcttcttcatctgggtccacgagaacacggcgcccaagacgcccggcttcccgttcgtcagtgtgtctctgaccacggtgttcgtgtgcgagatgctgctgccctcgccgctttcgtccatcttcgagtggagcttcctgcgctactggggcaagatcagcttctcggtctacctgctgcacagcttcgtgctgtacaacaagactgtcaactcgcagcccaactactactgcaggattttctctcgcttcgggctgctgtgcatgctggccacggcgtcgtatcacctggttgagtatccgtctcaactgctggcgcagcgtatcaccaaggcgcttgcggaacaggaaaccaagggatctggtggcatgacagtcttctggggtgaatgggcgaacccgtccaagatgctagcgcagcgtctggcgtgggcgcaggaagcgaaggcctccggtaaatggatggaggtgctgggactgaaaagtgcgcagcctacgaaggcgcagccgcacgaatctgcagcgtgagctggtaaattacggtagactctgcacgcttatgtatgttgtgcttcaacacttgtactaaaaagcaaataattcggtacaatgcatctttgcctgctcacaacaatcaccttcgaggccaactacgactcaacgcgacccagtaatggagactccaggaagaaaaatatgaatgaaaatgcattagtttacacttgactgaagaaagcatcgatgagattcttcatgacgaaatccttgacttgcgttgtgtgggcgcattacttgtacagggcggtgatgccgggctttcaaaatcgtgggatgcttgtgcctttatcgcgggatggcttgcacgaaatgaggtgcatgcgggttggatccgtcaaggccgaggtggtacagtcctgcaggcaggggtgcttcatcgacttgagcttgctgtccaggttctgaaggcctagtcttaagacttacacgtgatgaggtgcagcctagatccagacgatttgcaggtgatccttggacattccagttcgtcgacatgggacgcaaccaacggagattgggcattcatctggatccaggtctgcgtgtcaagccttcagtcctctcgaaggctgatcctgcatccaagcatgcacgtaatgaggtgcagctcaggcgcgggatgcgatcaatcggaccgaaaactcgaacatcgactccaccgctcgacggacgtgtcggccttcggcacgcacgtaatgaggtgcggcctagaccatgtccgtcaaagcagcagagatcgactgcaaaactggaatctgtcagatgcccaatgccccaagcgtacacgaaatgaggtgcagcgctggggtccgctgagaacgttgtccacgtcgtactggcccgaatgcttcagcgcacgtgatgaggtgcagcattggccaggtgtgctacgcggtggcaaactggaacttgcagtagcttgaagtgaagcactcacggggagtccttgcttgagggtcgtcgattcaccttggccgtcgatgtactcgcgatgatttggtgctggggtccgcatgaaatgggatgcagtccttgcatcagagaaggcgttgacctgaagagcatctccaaggctccgcgtgagcaaacacgcgtaatgaggcgtgcgcatagcgcggaggtcttggatcttgaagagtagaacggacgcacatgcaagcagatacacgcagtgaagaaacttgggtcttgaaggtggggtcttgaaacgtggaatcaccatttaccctccacccaatccatgccaaaaagagggaggagcggcgcgcaagtgaagacgctaaataggcttgtctaaagcctcgcttggagaaaacgcggggcacacgaaaacgaaatgaagaatctggacttgagctgcaaagcagcctgcatcggccgagctgcggtcttggcatcatcgcaacaacagtaacaacatatcagcaacaccttccacctcagacacttaccaagtccatgagtacctagaaaaagcggatcgcgaccgacgtcgtaaatccggccacgaagcgctcacgctgctgagactcgtacgagcgcgtgtgctcgttcacgtagaggtgggtgatgtcctgtaatgggatacgcttgggtgtcgcgctcttggaaaccttgaccgtcttcttgtgctgcttcctctcctccgccgacactttggtctgcctcttggtcttcttcaccttgcccgatttcttcttcttgcccgccttcttcgccgagatcatcggctcctgcgtcttcttcacgggggtcacaaactccgtctcctgctctgtatcaactgctaactccgtccactcctgctcttgctccttcttggttgctgtatcaactggagaccccacctccttctgctcctgcttcggttcctccttcacctcaaccttctcctccttcgcagctatgatgactgtctcctcctgctcctgtgttccctgctcctgctccgtcttggctgcaaccttctccacctttgcagctgcgacggctgtaatctccttctcttccttctccttgtcctgcttctgcttctgctctgcgctaccttccgtagctgtagtggtctccgtcgcggctacgggcgtctggctccgctgctgcttcttggcgcgcggtcgctcctcgtcgtcaacgtcgtcatcctcttctcgtcggcgcttgagactgcgcctggaggccacgccgcctgcgattcgggcgccggggctgaggctgctgcgtcttgggggccgcggcggagtccgtcgtggcgacgcatcggagaccgcggaggaagatacgggccgcgcgcgccggcggatgacgtagcccaagttctccttgttggcctcgtcgaagtactcgaactcgcggtagatgagcggcagcaggtggtccagcatggctgtcggggcaatgggctattggcggattgtttgactgtcggaatgcactcggccgggcgcttgaatgccgaggcgccaaaccaaaagctcgattcccgccaaaagcagttcaagcgggagagtcaccggtacagataccggtttggaaggcgtaccagtggtttggtaccgttgtgcggaggtagaagagtgacatgtcagtctttatcgaaatctgtgacgtggtgcagaaatgacggagcatgtggcgctctcggtgcgcagctcacagttcgcgctctccatctgcaagctctgctctgctccggttcgtgttctccgtctgcaggcgccacgtgtacagcttcaatttggctcggcgctacattacaacgtgacggtggctgatgctgctgacagtgaagcgaaggcagcgattgcgttggcgctgcccaacttcccaccttggtttccgaaggtggaccgacagtcgacgacggggacgacgcgcgacggacaaagcgcaggccgcagagcttcaggatgtggatgaatcctgccgttgaagcgcgctggtccgacgagtactgtcgccaatcgtggcgctgcagctctggcaggccatggactgaacttgcttctgacactgcaatgaaacctacgtgtatgtatctacgcttaaatttgactatacttaatgcagccagagctccgtcgtgccgtctgcggttgcgtctgcctgcaacgacgactgagcccggtggacgcggacgtcaccttgctgagccatcggtggaggcagatccttccgggcgacacgcccgtccttcttacttcttaatggacttgttgctatttcctgagcggtggtggcggcgcttggtcgttgcggatgaactagctggctagctccgaggccagctacctggtcctacgaggctgacgaacatgcgaagccaacaaaacatcgtcccatgctatggtacctcaatatgagcctgccgtcgagccaactataatattaggggcaataataagttccctacctcgcctcgcctcgcctcgcgcgccgtccgcccccgcctcctagtggcgtcgtctatggtttgctctagcctccccggacttgcttccgctcgcaatgggtgctgccatccctctatatacaaaaaacacgaccgggcatttgtgtgattgtccgtcggcccgtcaacgcgtttgctccgcccgctctcgatgtgctcgtgtcgtgatctcccacatcttgcttagtggcgtccgcgcttagatccactcggagcgcatgtcgaagatcgacgagcggcgcggcttcgtctcggatgctcgctccgctgcaggcgacgacttgtccttctccttgtcgtccgtctccatctcgggctcgccgtcctcgggtacgggcgacgggatcttgaacgaggagcctgcgctggacgagatcctgctggacggtaccctcttgctcacgccgccgttcactagtgactcgggcttctcgccggtctggccgatgtatccgggcgtgaggctctgcatctcctcgactgcggccttgatggccgggtccgagggctcgcggtgctcgttgttgcccaggtgcgtcgagaacacggggatttcctcgcgtggccgctggcgcagcgccgccgcgatgctggccgtggaggacagcacgcggccgctgcgcctctggatctccagctgctcggccagcgcctcttcgatgtcgatgtcggcgccgtactcggtcctgcgctgcagctggtccttgtgcctgggcttcatgcggctgaagaacctgcggatgcagcggaacagcgacttgaacatggcggtcgctgggtcactccaagggcctcacggtgctcggctgtaagtttcgactctgaaggcggcaggacacgaggagagaggggtcgttagtcggggcccatgccatgcgcggcttgcctgtcagaagcgagagtagctagctacagtaccgataagatgttcttccgccctgtgcgcggagagtgagagagtgcgccacggccgcttgttgccgcgtcgagcgttcaatcgatgtcgctccgacctggcctttcacgttgttagatgaactcaggcacacacacactgctggtggcgagcgtcgggctgttctcgaagagaagccggcgtgactggggatttgtatggcgcccgtcttgcacaatggatcttttatggttttcggatcgaactggccgcaaaagtactgtacgcagcgcgatttgcttgcggccagcgggccaaacttttggctcgcagcctctacggtgtactctcgcccacttccggccgagcggctcagccgctttgaccggcgatggccatcatttcctgccgagcgtaaacttgctcaccgatcggcagggtgcagcgcactggctgtatgaagcctccgaggctgcaaacctggcagggtgtctcggaagatgcacccggtggcgagcgtcgatatgttaattaacagcagtcggctgcggcgacaccagcctgctacggcagcaccagccgggggcactgttacactgcgaagtgagaccaggcaggagccaggcctacagctacgtcaatcgatatccatggagcgcggctggataagacttgggcggactaatatcccacgggcgtgagtccggtgtgtctgctccgttgtagtgatggtggccattatccttagtctcgacacgcgtgcaggacgctctcactaaaaaaatctacatgtacatgtactatgtccagcattttgcctacgtaaatgtccaggtctgaacgaccttcacttagtcgttcaaactgcagcttatctcgctgcagccaagtttccggcgggcaggaatttcctgctcgagtggacccatcggtctggtccaacgtagcagcgaacgctgcgaatcacagcttgataccgtggcggatgggcgttgaagctgctgcattacatgcacggtgcacttggtccagcatgcagccgatgcattgcactgcaatttgcaggcctgcaagggagctctgcaacgccaagcggggctacaattgccatcgaggcgaggcgccgcgacgagctccgcaaaacgtgacagcgccaagtgtatatcgctgccatgcgccctttcaaaattcaaacgcttcccgcgcaatgtacccatccaaagcaaagccacggtccacagtggcatggacggcagaagtcatcccctcggtctccgctgcggcaagttacagtatccagcggaaatcagccccggagcgaccggagcagccccggcgccgggatggcgccacctctgagaaaaacgcgtgaggcgagcgcgccgctcactccgaggcgagcgcgccgctcactccaaggcgcgcacgaccatcgtcgacgcggggcgagtgcgtccaagacccctggtctgcgttactcgaaagtgatgaccagctccagcctcgtcacgtgcgaaccgagtgccgaagggaacgagcaccttgcgtctgctgatttgaccccgactccgtatcagatacgttggggtgctggttgtgtagaatctatttgcaaaacaccatgtaactgctccttagagcaaatcgctcctaatctgtatgattacttagaataccacagtttgggagcgatttgctcttctatccgttctctctataagcgccgacgacggtattacggcttcaaccgtagtgtcgcgcactgcacattgctacatccggcacccccctccgaagacaagcatggcggacggcgcgctgctgcactcgtgcgccgtgtacctgtacctgtacgacgacgccagcggctcgtacgcgcagcagacggacgcggccgtgggctgcgcgctgctgggcagtgcgagcgacgcgttctcgctgctgctgtacgacaccaagaagacgccgctgctgcagctgcccgtggcgcccgggggcgcgcgcttcgtgccgcagaaggacaactacgtcaacttctacgagcgccagtcgcagcgcaactacgccatgcgcttcaaggacgcggccacgagcgagagcttcctgcgcgccgtggcgctggcccgcgcacaggtcctggtgcaggctagcaagtcctacgagcgcgcgcggcccgtggtgctcgtggaccagctggctgtcggcaaggaggacgccgcgcccctcacgttcggtgacgtggcgggcgtgacgctccgcaagtggcagggctccgtggacagcagaagcagcttcttctcggccaatccgctggagatcacgcagcagccagcggccgagcagacgcaggacggagaggtgagaaggatcaagcttgtggacggagacgccgcggccgacgcgggcccgttcgtggccgtcttggcctcggaggcgctcgtgagcatgcagaaggcggccaagaggctcgtggcggccgcgttcccgcagacgcaggagtgggtcatcgcggaggtggagctggtcaaggtcaagaagaacacgcgggcgagtgctggcaccacgctgacgcacgtagagcaggaggcggtatctgctggaactgaagctgaggacccacaggcacagggagttcatgatgatctggtgaagcgcatggcgagtttgtcccgcatgggcagtcagagctccgggctcattgcaagtgtgaagacgaagctagacagccgatcgtctatggagccaaatggggaggtggacgcctcgctgcaccgagctgcttctgttatccagtcgggagatccgccggcaggttacgtcccggtgttattggccggtcttcaactcccgggcgagaggccagggtccttccgcaacttgcagaacgaaatccagacagaggctactgctccccctacgcatgcgacgtcgctggctgcaaaggtgattgagcctctgaaacattcccccgaagcagttgatgtgggcgttggcgacagcagcagcaactcgagtttgactgcgttgtcgagtgatatggagcgcctgatgaaagagcagtcggacttggcgcgactgcgtgagcagctggaggagagcaagcgcaagcttcaatctgaggacgttagcgtgagtgaactgccagcttctcaatcgtcgacgttgaagaatggtactgcaactcattcgagcctgaccgagtacaagccatcacaggagaagcccgcacctaccttcacgccttcctcctttgcactcatggggtcaagtgcaccgcctatcgggaccacagcttcttatggttcgacgactaataggtggagtccccccaagctagacctggtgccgtccttctcttcgtcttcgtttgcccctccgtcgcagcccccgccagcgatccctccggcccccagtccattctcctcctcgcttacgccgtatgccaaccggtcgttcacgtcgtactcgtcagcaccggcgggaacaggacccggatcgtcaccggatgtggagaacggtatcatccgcctgcagcgctcgtcgacgtctatcgagtcgacattgcaggatcttcaatccaagatggacaggcttctgaatatgcagagctcgatcaagtcgacgaagttttccaccagttcgggcaagtacggcagcggcgcgtccttctcgcctgctacgtcatcttcttcatcgtcgtcttcgtcttcatcaatgttgctgaaaaatttggaaaaggctctggcccagcgtgaccagctccaagagataaatgctcgtcttcaggtagctaatggtgagcttgaatcaagtgtcgaggatcttcagagccaacacgagtcgcttcagatggagaaccgaacgctgctggataaactacagaacggcaaccatttgcaacaggagaagtttcgcttggagctgcgcagcgtccagcagcagctcagccacacacaggagcaaatgctggtgtaccaggaagaaaacttccagcttcgagctgagcttgcagccaaggacgagcagctcgcgaaggagaaggccaaactgcaagaagacacacacagacagctggagcatcttcaacgccaggtagaggacgaggtccgtcaaggatcgaaggactcaatcgagagaatggcgacggaaaaggcggcgctggaggcgcaagtcgcggagctgacggcccagaagaagcagtgggacgtcgagcgtgagatgatgaacaaccggctgagtcaagcgcaaagccagcaggtgcagcttcaagacgaaacagtcaaatcccaagctgtccagaactcgcgcgtccaagagctcatggtccgtgttcagcagctcgagagtgaatccagggtgctgaaacaacaagctgaagggttccactctgatgcgcaacacctagaagagttgctggcatcgaaagagcaagagatgactcagctacagtctgccaagaacgaccaggaatatgcagctctgagcgagctgttcaaggagttcatgaacgatatctacttccacttccaggacgcgttcgacgaagacacagagttcaccggcaaagagatcgtgatggccatccggaaaatcctcaagcagaatacgatggatatcctggccaagctggaggagttctaccagcaacaggcgctgcatcgccagtgaagaaggtaggtagcgacagcggttgaggttgcatcctattgctttgaaatgaaattcaatcgaaagagaggtggcgacggaactatatccctcactttggaccggcgataagcgatggcgtgagtgtgtgcgtggaaagtatgctggacacggggccggtatcgtgtcaactcgttgtcgtgtgctaataacgggtttgtgacgaaggcagtatttcttgcgcagacaccaagtgatacatgggtgagggtaagtttagagcctgcattaggcagaaacgcttttgtcacctcttggactggttcttaccccagtgcaagcgtgtcggtcggcttgatcaaagtgaagcgcgatggaagtgctggtgcttgctgcaaacggcggcgccgaagccctgttcgacgtagttttgagcgttctccaaagtacgtgtttacctgaataaaccggggttggtacgcagcttggctaatctggcttgtgctgctgccaacgcaaattaccgtcactccagcttcggcgacaccggttgaaatcctctccagtctgcctgcggtaaggtcaagtcgtactgtgaaaacggaactggatcgtgagtatttagttgtgactctgcaattgtttgttgtaggcttcagccgaacttcaagatcaccaattggtatgacgcccgtcttgcagcatactgtcgtttgatgcagcgcaatccaactgagtcggtgtgatgcgtagattgtttctaggaagcgtttggacagagactccctgtctgccattatcgggaacgaagcaggcagcaaaacttcgcctgatagtgacaacgcagacacgtctcgcttggactctacagaaatttcagcgaccgacgcctttgccaccggtgataccagccacttgctacgaaagattgacaggaagagcaagaagatcaagctgttgacggagcaggtcgactcgttcaaggccaaggcgcaagatgcgatgcaaaaggcccaacacctcgagatggagcaggagcagtttttcgacgacgtgcgcgagatgaaggcgcagttcgataagctcgctgaaaaccaccggaagttgatgtgggagtaccttccagcgcgtgacccaagcctgcgagccattccccgtctaacgacgcagctaccggagacaccaacagcagtcgggaagtacccgttagagcaagttctgggctacggtcagtacgcggttgtgtacacttcaagcactctcgagcgaccacagctagcgatcaaggcaatcgacaagcagaagctgattgatctcgtctcgctgcatcgtatcagctccgaaatcgcttcactgagcgatcctgccattcgacacgtaggcgtcctggagctggttgacgtcatccatacgcgcaaacatatctacttggtgacggagcgtggagggaaggacttgttcgagttctttggggcgcatctggatggggtgacagaggacacgattcgtccgctgttcctacacctcgcgcaggcactggaagttttacatcgcagcaactactgccaccgagacttgaagccgtacgtgctgaacagtttgagtcaagctatgctagagtcatgcaacaggactaaccaaaagttatgtgtgcagggaaaatgtcctgtattcgcctgatgatgcgcacctggtcaagattatcgactttggtctgtgtactaaggctacatctgcgctccacgatttctgtggtagccccggcttctttgctcccgaattgctgctgcatgaaagctacgacgggctcaaggcggatatctggagcatcgggtgcatcttgcttgaggtacgttccgaactatgagtgatttcagcgtcttcctttgcattgacgccgtaaattgcccgtttagttggtgctggggaatgcgctcttctcgtcgatttggatgtccatgtacgagatttcgatcctgaaggagcccaagaagttcgctgagtgtgtcaaagaggtcagtacgctcagtcaagccattttcacgcaagctttgtcaaaggctctgttctaatacctcttgtgctgcaggcgttagttcgaacgcgtgacttctgccacggacccaattggaagtattcagggaagctgcgcactgtgctgctcggaatgctgtgcgaggatccgtccgagcggctctcaataaatcaggtgctagctcactcgtggctcgccgtcgacggtccatcattaccctgctcagcaccatcagctccagcttcagcttcgcactccgagccacgtagtttatcccccgttaaaaccaagtcatcgcacggacctcctttgagtgccgccgctcggatacccgacaacacagctacagacagcgacgctagcgtgcacccgctcccaccgcgcgtgctgtctgcaccaggcactcctcgcagtgcccaccacttgcacaccccgtcgggcgggtcactagccaagctcagtctgccaagcttatcccccgagaagccgtcgagccgctgctctcccgagcgcaagggatcaccggacaagctcgcgtttggtgtcacgcgagtttaattcagcaaaagagtgcggatatctgagggggtggcttcaattagactgtgtgcttactccacgagtaggtactttactttactggagcagcgtggggatggcggccagcagctcctgcgcctccttgaacgtctcgagcgactcgacctcctcccggtttgcctcgatgaagttggagacgtcggtggccgcctccttgagacgactctgacagtccggcagcatggtctccgtctccaccagcacctcctcctgcttgcggatgtcgtgctcgtccttgccgtccgcgcgcatcttctcgatcttggtctgctgggccgcgtgctccttggcgtagtactcgaggtccttcttcaccctgtcaagcaccataaaatgtgttattaatacataccatagatacgtactgccatcacactctggggcctgatacgcaccggcgcagagtgcccactttgatcttgaactgccgctccgccatttttacggttctgtagctacgctaagactttcgctttgagatcgacaaaagggtgccgactgttgcgacgatcgttcaccactgtttgaacccgtaattttgtgtacgccacctaaactgaagatgtatacggcaaaaggcaaattcaacaccaagcggacatttattcattgagaaaagggtgctcccctgcgcttagctacggtagcaagtcttgattgagtgtccacgtggctgcaactcctctcggttctgaggccgtgaagagccgactgcaatgcaagtcttcgtctctctagttggaggaggcgtaggccttctccagcgggtgcgggcgcgtgatcacgtcgaagcggtccggacccacgccgatccacttgatgtgcgtgcccaggagctcctccacgcgcagcacgtacttctgcgcggccacgggcagctcctcgaacgtcttgcacttggagatgtcctcggaccagccgtccatctcctcgtactccacgacggagtcctgcagcagctgcaggttcgacggcatgccgtccagcttcttgcccttgtgccagtacgccacgccgatcttgaccttctccaggcccgtcagcacgtccagcttggtcaggttcagctccgtgaagccgttcaccatgttggagtagcgcatctgcgggatgtcgagccagccgcagcgacgggcgcggccagtggtcgtaccgaactcggcaccaaccgtgcccaggtgctcgccgaccttgtcgtgcagctccgtcgggaacggaccctcaccaacacgagtgcagtacgccttcacgatgccgatgatgccgttcaggcggttcggagagatgccgccgcccgtgcacacactgccgatgctcgggttgctcgacgtcacgtacgggtacgtgccgaagtcaatgtccagcatggtagcgttggcgccctccaccaggatcttcttgcccgccacgtaggcgttgttcaggtacgagaccgtgtccacggtcatgtccaggatcttgtccttgatgtcgctgtacgccttgatctcggcctcggcgtccgcctccagctccgggtagttgtccttgtagaacttgaccaggtcgcgcatcttctccgagaagtcgtcgaagtagcgcaggtcgcccacgcgcacgccgttacgcagcatcttggacgagtaggccggaccgatgcccttcttggtcgtgccgatcttgttgcggccgcggcgcagctcgttgatgccgtccacttcctggtgcaggtcgagcaccatgtgcgcgcggtccaagatgagaatgcggccttcgtagtcgatgccggcctgcttcagctcttccagttcttgtagcagactcggcaagtgcaccacgacgccgttgccaatgatgcacacggcatttgggttgagaattcctgaccgcactaggtggaacttgtacttcttgccttcgtgcacgatggtgtggccagcattggaaccaccggccacgcgcagaatgacatcatacgattgggataagctgtccaccagcttacccttgcctccatccccccatggagcccccagcaccacgtccacaccagggttcagacagtcagtgtgacggtgcgggttagccacggcgctctcgatgcgattgagcttggccaccacctccttgagtgtggctagcgtggacacctgtgggtccacgggcttcgtgtccttcttggcgcagcacgccttctcctccggctcatccttttatccgcagtcgcagtcgcacttggcgtcgttgtcgaagccggctgcactcgcggcggctacagacagtagacgcccgtagcggtcattgcgtgctgggactggccggcctccacgaccagcgcggcgcggagcgcggccgaggcatgggccgtgcggaactgctggctctggaaccgggccgaggatgagaagcgcgcggccgcgcgcgcagccttggacaccacgtcgaggcgcatatcccctctctcccctccttgtcacccgtgagtcgagatgtgagctcgagatgttaggccttcgtcgccacccaagcagcatccaaccaacgcagcaatcgggtggccacgtgcgtgttcaacgaaggcagcttactcatgttcacgtcgcgtatcttggccgccttgacggcgtcgtgatctgtaggcttatttctcggatgatactgttcaggtagccctgagttcgagcgagatgcaatgcattacatacatgcattgtacatgcactcgccgcgcccgccagagttcatgcagcccagagaggcgctggcgcagtactgcgaagcgagcgccagtcaaaccctgtgcatctaccggtacaacgcaggcagtccacgccatcggtggcagattgcgtgactacaaatgcctgccgtgccattggtcagtcagcctgggtttggtttgacaggccgagctcaccatcgtggcccatttcccagacccgacccgcctggcggctctgagccaccacaaacacgccgaagttccagctcattccggatccacgcgccgcagggagaccggagggagacccgcttcgatgcgtctcgacgtcgtgtccaaggctgtgcgcggcgccacgcgcttctcggcccagtgccagggacagcagttccgcgcggctcacaccaaggccgcggtgcgcgccgccctggccgtggaggcccagcagcgcaacggccgtttcgccagcctgctgcccgtggctgccgccatggccctggtgggcgcggccggcgtggccagcatggacgacggctcggccgccaagtgcgagggcgcggccaagcctgtgagccgtgaggccgtcacgcaggccatgctcaaggaggtggtggccaagctcaaccgcatcgagagcgccgtggccaacccgcaccgccgcaccgacggcctcaacgccggcgtggacgtggtgctgggcgcccagtggggcgacgaaggcaagggcaagctggtggacagcttatcccagtcgtacgacgtgatcgtgcgcgtggccggcggctccaacgctggccacaccatcgtgcacaagggcaagaagtacaagttccacctggtaccctcgggcatcctgaacccgaacgccatctgcatcatcggcaacggtgtcgtggtgcaccttcccagcttcctcgaggagctggaggagctcaagaggatgggcgtggactacgaaggccgcattctcatctcggaccgcgcgcacatggtgctcgacctgcaccaggaagtggacggcatcaacgagctgcgccgcggccgcaacaagatcggcacgaccaagaagggcatcggtccggcctactcgtccaagatgctgcgcaacggcgtgcgcgtgggcgacttgcgctacttcgacgacttctcggagaagatgcgcgacctggtcaagttctacaaggacaactacccggagctggaggcggacgccgaggccgagatcaaggcgtacagcgacatcaaggacaagatcctggacatgaccgtggacacggtctcgtacctgaacaacgcctacgtggcgggcaagaagatcctggtggagggcgccaacgctaccatgctggacattgacttcggcacgtacccgtacgtgacgtcgagcaacccgagcatcggcagtgtgtgcacgggcggcggcatctctccgaaccgcctgaacggcatcatcggcatcgtgaaggcgtactgcactcgtgttggtgagggtccgttcccgacggagctgcacgacaaggtcggcgagcacctgggcacggttggtgccgagttcggtacgaccactggccgcgcccgtcgctgcggctggctcgacatcccgcagatgcgctactccaacatggtgaacggcttcacggagctgaacctgaccaagctggacgtgctgacgggcctggagaaggtcaagatcggcgtggcgtactggcacaagggcaagaagctggacggcatgccgtcgaacctgcagctgctgcaggactccgtcgtggagtacgaggagatggacggctggtccgaggacatctccaagtgcaagacgttcgaggagctgcccgtggccgcgcagaagtacgtgctgcgcgtggaggagctcctgggcacgcacatcaagtggatcggcgtgggtccggaccgcttcgacgtgatcacgcgtccgcacccgctggagaaggcctacgcctcctccaactagagagacgaagacttgcattgcagtcggctcctcgcggcctcagaaccgagaggagttgcagccacgtggacactcaatcaagacttgctaccgtagctaagcgcaggggagcacccttttctcaatgaataaatgtccgcaagcttctactagacttcttgacttgcgatgtcgaactgcttccttcaatttaggtaatacctacacaaaatagcacttaaacagtgaacgaactcgagctgaaatcgaaagtcgtagcgtaacagaaaactgaaaaagagaaaactacagtcaaacctgtttatatgaggccctgttggtgaccatctactacaatgactcatataaaatggactcagttaaaacaattatgtggtgcacgtaaagaaatcgtgcatagttcgctgccgctttgccttcaccgtagtctctcgaaccaaagcggtcacggtctgtaaagctcttcgttctctgtcagtctgctctccgcattgcagcagcaatgtagccagctccatgcagtgtctcagagcaatggcaggttgaactgcgggttcctgttcctcctcttcctcctgctcgtcctgcgaaactgcatcacttcctaccgcttcgtccactagcacatctggctcgtgcacaggaacgtcttcgtccactgccagatactcactagcgctaacagcgccctcccacctcgatagcatcgccgttaactcctccatctcgttgctggatacctcctcaatgtaatccgtgtcagcacgggtcctttctagtatgtttcctcccaaaatgcgagtcttgacccagcaatttgtaattgtcgttggcctcacacccgcccaagaatcaatggagaattggacagcttccagtacgttgagcttgcgtgtaatgttagcttcaagtgcatccaaacaccaccgcacaaaatagtttcggtaccgagccttgaacgaccggataatacctgaataaaaataacaccgtaatagagttggttagtttaggctacaccacaatatagataaaatatttacctgcatccagcggctgtacggcggatgtcatgttaggagggaggaagtgaacagtcacatgagtcaggtttcgtagaatcttgtggcatgaagcattgtcgactagaagtaggaccttgcgattggcggccgccattctcatgttggagaggtgcagccattcgtcaaaaatgacggatgtcatccaggcgttcttggaggacttgtacaatataggtttacctttaatcgccgctccctttttaaagcacctcgggttcttggccgtaccgatgactattgggtcgagcttgtcggagccagtcgcgttgcagcagaaggccaaagtcaaacgttgcttctcctttttcttgcccttgcgaatagtcgtagctagcgttcgattaggcgctaagcgatagaaaagcgccgtttcgtcgaagttgaacacattctcgggtgtaaactgcgccaccaactcttgtagctctagcctcgcatctcgcacttcatcagcttctacagcgccaccttcgccgtgtagcgtatgggagcggatcccattgcgcttcttaaagctttcaagccagccgttgcttagccggagctgcgtggcatcgatgcctaagcgctccgccagctcatgcgccgtcagcaggagcacgtcgtccgccatcgccgttttagcttcgttctgaaagaaaaattccctcagttcccgctcgaactgagggaatttcactcggcgccgcttggtcgaactcaggtcgacgtggctgaagtaggaagaaggcaggttgcgcagtcgggcgagtgtggcacggctgacccgggccttgaaagttgcgtagatccactcggcgagcatggggttgttcatgccaggattctgcttgagctttaggtgcacttggagcttttgttctagcgtcagacaggtgcgaggagacatggcgagcgaagaaggcttgcggtaggcgttgagtgttgagcagtggtgctttgaagagtgtgtggccgtgagcagtgtgaatcaaataaacaggtgagacctaatttggtccccaaaaatgtaactcatataccttgtatgcatataaacagagatcatacaaaaactaagtgaaatatttggtagcgacaaagcctgcatcaaataaacggcatggctcaaatagagaggatcatataaacaggtttcactgtatttaatccagagttgttgggtgaatcccaaaaaccttaccaattttgaaatgatagcaccataaaagatttatgtttgcgttaaaccgatgcaatcatttcacgacaaaactgaatgttgcttgtgcctcaatacacatcgaacataatgatggtaatgaaacgcactcactcgagcaacaaccatatgtacctgtaatatccatatcagagtattaaatactagaggtatacttaccaaaggaaacgaattcggaaaccgtagcaggatctttgctaaactgtggaagcaaatagcagaacgtgatataagtgagatgaatgcctcatcagcacaccaatatatacgtgcattttgctagcgtgccctcatgtaaaattttgagcggcaaggatgccggaaacactgaaagtaagctcgccatcatggggctttcgcccaatgactagtgctggaggatctcaatcgcgttgctttgatgagttatattgtaaatgaacacgctgcagtggagctttcactacaacctgtactatacaagccgacgcccccactcttccaatagattaacaataaccatgatatgttttatatcattgtgttaaacaaatcagagtctcgcgttaaccctttaaatattaagatcgacgagtcgaacctcagcggaacaccatgtcacgtcaataccatatttaatgataccttgcttggcgtgctctccggtttcctattggtagtgagtggtttacacctcaaacaccgcgtgataatcagtttgcgcggaacgaggatcacctacgagcaatctaaacgatcgacaaggcacaaacggtgaaactgggtggcctcattgagcaaagagtctttgccaaagacgtcgatcaagaaagccgccacctactacaaacgccaactatacgtgcgcttgatgaaacctacaatcccttttactttattaaatatattgaagacgaagtttagtgaataacacaagtggggcaatactgtatctgtaaacgttcatcaaaacatcatgacccatatctagcgagcggccctgtagacagcagtgtgcgatccaagtattgtgctttgcatccagtttgcctttctatgtagtgcactacttagtgttcgcacttagcggtaaatcatagtggccttgaatgcaagttgctaagtcgagtctcgaacccggtttggttcggcaatggcactttctaaaattgccaaaaggtgctggatgtgctaaaccatgcaggagatggcgtatgcgcactacttagtgctgattgaccatccacgactttagcaactcgtacatgagtacgatttatcaataagtggtgctcgataagtcgtacaagatctctcagctcttaagctgagagcacagggtgttcgcagagtcggttcggcaaatttgtgaatgtttttttatgaaagaaacactgtggtcgcgatcgaagcgcttcagttagcctcactatgcttttcgcaatttctaacgtaaaaaacatctacaccacatcgcgctcacttgcccccgctatacttggcgactcgcatgggacagcgaaaaaaaatctgcgacagaatttagaaacgtagactcgtgtcaacatttcccaggttaggtactcgatacttttgcctacttgaacaggcaacaacggtactctcccgctcaagttcatgcgctccgcactcgacatagcatcgcaccaccgacattaaacttgagcggtaacgtgcggtcgcggaaacttccttacttaagttgcgttgccgacccgtcagcagccaatcaagggggcgcgcaaatatggattccgggctcacttgagctcactatggtttagaaaggtgaactcatccaaatagaaataaaagccatgcgactgcgcggaaagccagcaggtttccctacttttgttacggcgacccctcagagctgtcaccgggtgacagtttcaggcgcccttcgagtaaaaaccatcagcagcttggtttttgtatgcgcgggtggtgtttttactcggctaatcaaaggctttgattgattcatccgccgccgagaagagtcggcatcggcatatgcgttggcgatgaatatggatcggagaaagtctctcgacgcgtcaggggattctactactactactgtcccaagaagaagaagagcaccctcactaggtcaccctacctcaagcagactactcccgtgcccgatgcccgtcacgacgcgagcaagagaaccgcccagacatccacgctgaacgccaacaaacaggagaacgacaacatgtgcaccaagcagcacagcgacgacgacgactacccgaacccccagcagccccacctcagcggtcagtacaaccgggaccaatacggccaccattacggctaagccagccgtacaacgacgactacttgacgccgcagagtcgaatggcctgcttgcgcactccgacatgtcgttggtgcccatggcacagaccaacaccagcccacgctgacaaccagtactcgcagtactacgccgagtcgtccttctacgccaacagcacgtacagcgcgtaaaataattaatacctgttgttccagcactgtcgagctgctggtaccgtacagctcctactgacctgtcgaggaccctggtctgctgttgttttccaacaaatactacgtagtattttagattaaacgcgagttgcgggctcaagctgcgattcgcttcgataattcaaaaccacttcatccaaagcacttcagtcaaacgtacatcggttactcccatagctagtaacttgcaaatggactgctctttgctattgaggatccgtaggatacagaagtaaaacaatagcgctgtacttaagtaaattcatgtagcaggaggtagtgagcgattgcaagggcacgtagccgaagaaaaccctactgtactcacaaattagggccgcccggaatttccagaggcggaaaccattgccgagcattcatacaaatcggcctgcccccacaactaggagtaagatttattgctggggtctggggagtgtaatccacagtccacacacatctcaggagaaatccatgaagaaagtagcaggttaaacagaaagcaacagcagaacagggctcatgacaggtgaacaggggctgtaccgcaattcgcatgtagagagctgcaccctatgttcaccccggtaatgttgatctgtattcgtacttaaaaagtatcatatacaaaattcaacatgttgtataagtcacaactgtaatattgtggttatatcttatttgccgggtataataattggtctgattggataaaaatatgtagatcgcttcatatgattggtcgatgtaggtgcatctcataagcgggtgcagctctcaacatacactagcttacacaaaaccagaagtaagctatttgctttttgtttgcttttagtgagctgagagatatcttgcgcgaagaggctcgaagaggctcgagcagcgcttctgttacagtccgaagtaccaaaagtctgcaaagcacaatacgtgtaaataaaaaatgaaaaaaggctcgaaaatccagagcttccccgcgcaaagcacggttttgtttagctatatctgacctgagttagtagcataaggctcaaaggggaggcattcccagttggacatacctccccacctctcatgacgcattagaactgcaagacattggggacaatagtacactgtatatagccacttcatagcactatggccatctaaatcacctgtgtgaacatctacggccgctacaacttcgtgccacgccgatctgagagggccccagacatgttttcgcggcggtcccttttgccggcaaaaagcggcatttctggcccctacttcgcaactcgcagcccccaggcgcaaatcgggctagatatagtttgcttccctcagcccttcctgctaaatcggagccctcctgcaaatcgggcccgatatatcggatcttggaccacccgatttgtcaaaacggatgaaagccacaatacgttttgggatattatcccgtcaacgcaatgcgttagttaattacggaagccgtaatttatgattatggatagtttacgagacggattgctggacgggcaactggtaaaaaggatacagctccagatttactttttgggatcccgtcacgtggttgacaagactgcaattgagtataggcaagcccgatcaaatcccccgactcgcaaattgcatactgcaacgggtgggcatgaagtgagtagctagtctaggatacaaaagtgcacggagaaagtgcagttctgcaattttaaattaaacaatcaaactgcttgacccgagcaagccaagcctgataactcagatgtgcttagtaaaaacttttgcacttttgcatgcacttcgcgtctgcacatggcttagtttccactgcgaatatcacttttcaatttaccctcgagcgacctacagcttcacagtgcattcccggtgaaagcaagaaaccaaccgctttcgatttcactctaccgcacttatatatatgtatatattcctttttagaaggctgataacctcccaatgtcagggccgccgaaaatagcatgaccataaaaataatgggccatcataacataaataaatttattgtggactgaatacctagcacatatcaatatcataatttatgcagcgaatctacccaatgtcataatttatgactacaaattataccctacttaatatcatattttttatctggaatcctactaagtatcatcgtttttacattaaccctttcattatcgccatacatttctgtttgaagagacaccatacaaacttcaagtttagagcgctaaaagggtacttgaagtacccttctagcttataagatgacagaggtttcttcgtgaatatataaaaagagataggttctatgcgccctttcgataaaaagaatacatcaggtaccattgcacggatacgttttgattggcagataagacgcaaaaatagcagtatgaccagtaccgtggggatcctaccgcaacaattgcagcatgagcagtaccgtggggatcaccggggaagccttgcatgttcacggcactgtgtagggtgtattcgcgcgcgtacctgcttgaggtggacgaggtgtgcatcctgctgtactgggactggacggacgagtacgacgtggagctgctcaagccgctgcagcgcgtggtgggccgcatcgacctggcgcgcatgggggcgctgctcaacgccatcgcaagctggggcttaacgcgcccgtctacggcatgcggccgatgcaccgcatggggcagattccactgtatggcgccttccaggcaatgactaagctcaacagcgacttctcgctcttctcgccggacgacttggacgtcgtcttcgagcacttcatgcagctcaagtacttggacaagttcacgctcacgagcggtggcgagggaatcgtcataacgcccaatgtttctggccacctcggccctggcggcgcgctctgaagggtcatgaaggagacggtaagacgggaggtagcatactttttgcctttggacgtggactgacgggtgtgtttgatgtaggacgacattatataccgatggaatacaaccaccgctcggagcacgtgctgcagaagacaatcctggactcttttttcgtgagttttccaacgctagcggacgcttgtggtggtggtatcctgttgtgctgatgatggattactgttttgctgttgttgattgccgacgcccgacgctgcttatcacaggctcgataaacatccagagagcaagaaactaccgctgctgttctcatcgttgtcgccctctcctgcctcactgcccgtgcgcctcggagcgtttgtgctgctacgctccgcctgctgtgtctccagtcattcgagaacgcctcgttcgtggcctcgctgctctagcagatcctcctccgcccaggtgtccttcatcgacctccccgtggtcctcccaccggccgagcaggcagccatcgccggcacaacgttcgtccttctggccgagacgtccctggcggttgggcgatgcccgcgtgctgctgcccgtgaccgccgacatgcgaggcttcgattgcggagcggccgacagcaacatgaagtggccgctccagctgcagtatcgacacccgttgattgttggctactgaccctgcagcggcgggtgggaagggcgactacgtcgacatgatggtgccgggaatggtggatatatactgcaatcggctgccattttgcagccaaagtgactcgcagccacgacgtgtggatcatgactgacatcggcaagatcaacgctgactcaaacacatacgaggtggaagacggatgatgatgacaccagagggaaggcagacacgcacgctgcatcgcacagtgcttccaagtgacggagttgatttgatccaggatggtaagctgactgttggaaagataaaaagctatcgctctactgatacgtttttgtggcttcgtgtgttgtgcctttgtcgtttacaggaggctgtgcaagtgaccttcaagttgacgaagatgagcacatgaattgttttcgccggacctcaagcttatcgcactgtaatgacaaagctgtggttttgtgatggttagcatatgtaatgagatagactgttacaactacgcttcatggccattcgcttcctactgttcccggcgctctttcaagaactgatgctgcgctttataaatcgaagacgtccgtttcaagttgccgtcaattgtgtagacttgcttgggcaggtaaaataggtgatatttctgccagcacgtccaagattcttgctgacacagatgcggttttgctgggtcgatggggtatgaacgcttgcacagagcaactccatgcttttcgcagtaatcggtcttttgggtgggagttctgcattcaaatttgcaaactgtgcatttgcgtttcgagcggcttctcccttttagcaccatccatgattccttttcgacgcacatctgtggtggatcagcttgagctgaagacactggtggatttggtgcttgggatggcgctggcgcctctgcagtgctggtagcatacaccataccgcagtcagtattgatgcacttcttccagtccccgttgaataactctcgtactagtgacaccacgaatgatcgatggctatcacgagacttggagcttgcttgatcgttgagatctggcgaagaaccctcaccgctgggatcacgcgctaggccatggcaaatataggcattacacctagcaatgttgatcatggccattgcgagttttttgtgccacttctggaagctgtggccatcggctaatgaaaaccgcgcgcgcaactgatcaacccggtcgacgccttgcatagccttgttgtattcaccgatacaggtaggtgcagtgaattcaactggtgtatctttgagtcgacgatagaccgcagatgtactagacgcatcagcattcgagacgacattcacgatagatccatccacccaactcgccgcgacaatgtgcttttctaggcaaacaccttgcttcatgtagcctcgagatttatcatctttctttcgaaccatcgtgaaatgggggaaatgcttgctagatgagcgcactgtgccacgcccatagaggcccaccgtccttagactctccaacagcaaacaggaggtgtaaaagttgtctgtgtttacgatcctgctagagcctttcaaggacgccgtgacttccatgacatgggagcgaatttccgatgacttcgcagtgagatcagcgtgccgatgaatttctgggtggggaactacaccatccagtctgtctactagatcgctggagcagtgcagcttgaagctaaccatgtaccacgacgttgaacagcagcaagcgtacaacttgaagtgatactttcctgtaggcttctgcgggttgaatacgatgatgtgtcgtgcatatcgcgactggcaagcaatactagcctcgtcaacagccacatttcgaccaacgtccacatgacgcaagcaccgcgatttgagaatgctgataagaggccgtattctagcagcagggactcgttgcaggtcagcggtggtaacacctgaacgaaaactcaaattccggcgaatgtagaggaatcgacgccacgtcataatcgaccccaacccaatcgcgcgatcaccaggggaaatacttgcttcctcgtcgtcaacccaatagttcatctcacctttgtcgaccaaggtcatgtaccacagaatgcccaagaatttcatcatctcatcaatcgttactggcctcgctgaagggctaccagcggcgtctgcatattcgttcgtacaaaactacgacttgattccaaaacgacagcgggaaaaaggcaaagaaagccgaggttgctgagtgaccgaatagatgctggctctcctggcgtagtttcgtagtcgacgatccatcaggatggctgaataaactcggcggctgtcccaacgatgcggtaggtgaaaacgacatggattcaatttgctcaacctcgtcagggctcaatgcgatttgcaactcttttcgaccacgaaaggctgaccactcacggtagttttcctcatccatctcctcaaattcctcagtaagtgctggaatgtttgacagttttggaatcatgctgcacagctgcgtccaggactctccaaattgtaactctccttgatgtgcttttgcaaactggcgaattccccggagaataatgtcttcaggtacggtatgaacatggtccttgccttgaaaactagtgcaagtccattgtacctcgaacatggccacaggtacaccgatgttgtcgctgtttttctcggtggctaagctgtagcgggtcacaacacctatcagataggtagagccaacgccctggtaaaagctcagcgacatccactcctcgtcagctggggcaaacgccacactagcgccgacaaatttgtcagctgctgcgtgggctctacgaatcagttctgctctcattgctgtagccttagtcttcctcttagcgtgcttctgcaggggggccttccctttcttgcttgacttggcaacttgtgtcacgcttgaggttgaacgggttggccctttcggtcgagagttgatgcgtcgtctcggtttcgatgtcgctgtcgcgttcgatatcgtagcggacggagctaacggtgccatcaccgacggtccagatgcagaggcggcgttttctcgggtactggatacctgatgcaggtttcgctcaccagctccagttgtgcccaagttcacttccgtagcctttttgtagcaccatttgctacaatagctactatctccaaaatcttcgagaagtccacccccgggagcaggaaggcttagcgacgcgcatacatcatgcgagcagaagtggtgaataaactttttgcaccatgtgcaactgcactcagtgctacactcatccgtgcacactgcacatcttgtttgttcacttgctgcagtcgtgtttttcggtgggaaacaatctgacagctcgaagcacctgcaggactagcaggagcgcgtgcagtagtggtttgcgaacttactgcaatgtcaacagcttcaattctgccgcccttcaccacgccagaacgctccatagcacttgactgactttgcgcactgcacgtgctcctgtagtactccaaaagagaccgttctcctagaaagaagtccttactttccacgctgtccacgtcaccgtttggagcgatgtaacgatgcagatcacaaaggctgttccgacttggacgtttggatgtccagccagcttcacgtagcactcgccacacagctccgaacattactcgatcggaagccaaatctacatctaaatcacaccaacacatcactgttaccgccccgaacgtacaatgtatgcgcctaactattccgtacggaggtcagctggggcatggccaactgagtgcgtggcttgtactggctgccggcacttagaagtccgctcgctagagcattgatcgagatacttccgtttccccgacattcacctcttgtggagctaagaaggtggtcaaatgaccttgcactggcaattgtatgggctcgtggaatcttagcatcatgaaagggggctcgcagagctcgcaaaggctagaactatctatctcacgtgggttgatcgagaagagccccccatgccgatcgccagaaaaccccagggatctgaaggtgaggtgccgtgctgaaagcctatcactacattcaatgtgatgtcgaggactacgactgtattgataaaggtacaaataatatattgcaagtcgcaaggcaaatcgtgctcacgacctgaactaatccacggatggtgttagcattagcagcgcccgccggtgtagccttagcgtcgtgcgttgtgcccccgccccgaaaagccttccctaccctctgtgtctcccgtagccgtttcgtccacggtgtggccggccagcgtgctgctcatgtgttcgccgatccttccgaggccgcgttacgcttgacgtcgtcattagcgtcccacccgtgtatccgccgacgcctcagtggccgagccgaacttgacgccggcggacaatcgggcagcaggtcgcccattcagtcccgtcgtcggctcttatgggccagcgtcgtcgtgtcgcagttgatggggtcgggtagcggcgccgttggccagcgtggcctcgatgcgactcttgtgctggtgaggctggcggcattgtgagcagcagcacctcgacggcccagataggtgggttgctcggcttcacgcaaatcggaaaatgagttccaactgcgagtttataaaacgcgcgccgcacggcgcgacacagggaggatttttggcgggatctacgcgctacccaatcatacgaagccgtgtatttcggtcgtactgtcattggcggaattttacgcggtcgacgcgtgattggctaaagcgagcccaaggaaaaaacctcgcgcttcagctagagcaagcttactttgacttcaaccacgagtaagtcgtccgagacggctagataactcgctcacttgaagtcgaagtttgtcgcacttgggtcgataagtcgagggagaaaggaagacgcatcaatactatgtaacaagacgtatgtattaggagctggtgttttggcatggtaattcatgcgatggcaaatggatacagcactgcaccagtgcccacggcgaccgccacgctggtcatgccggtgatgaagccaggtattagtagtagcatcgtttacatttacggtaaatggtagtgatgccccgcgggtgccaatgcacgcaccaattgacaaagtatatacaagtaagctgtagtttttcagggattgggtggcctggcagcgtcgccaatgcactgcagccatgctctacctcatgcctatctcgatcaattctgtcccagcgccgtaaattgggcaggtagtactggcggtacagcagagctttaggcggtcgggtgtccattggtggtgtttgaatgtagtatgtagctcctcacatgaaattagccaacgctaaggtgagatagtctccttgttattgggttccgcacgttggcgtgccggtcgtgacgacgcctgcaaccgtagcaaccgggacaaagaagacacagaaaatatcatgtactgagtctattggtggaatgagtaagaacggtcggagccgtggcgactattatcgatcaatctaacgcaaattcttcctcacaatggtaccctatgtaatgggcagtagtaagctacaagccatcaacaacaggtttaacaaaatttaggtgctaacgtgtgtcgatcggaggaactaataagtggtaagtatgagtatagttttacacacggcagcggtctcactaaacccaggcgtaaaactatacttaccacttagcttactactgtgcctgatatgcccattacatagggtaccatttgtgggagacacagagggtagggaaggcttttcggggcgggggcacaacgcacgacgctaaggctacaccggcgggcgctgctaatgctaacaccatccgtggattagttcaggtcgtgagcacgatttgccttgcgacttgcaatatattatttgtacctttatcaatacagtcgtagtcctcgacatcacattgaatgtagtgataggctttcagcacggcacctcaccttcagatccctggggttttctggcgatcggcatggggggctcttctcgatcaacccacgtgagatagatagttctagcctttgcgagcactgcgagcccaacgatcgcgacctttctagcgatattgggtcatgcgatcttgggcctgggagcatgctctggccgtgcgagcgcgacccttctcctcatctcgaaatcttcgcggtcaccagcagagcaccaataagtatggagaaggacaacaaccagacacaggaactttccgcaccgacgctcacatttgacacactccttcctgtgtttgtgccggcgcagaatcgagtaagtcttcgtttggcttttcagtaataatggccgtcgatatcttacctttgtgtacaaggtgtttgaaccccgctttggatcgagctccgacatagatgactttgccgacatactgcccatttctgaaatgcacgcgatgtttcgcgagtctaaccttcatcgcatggaagagcaaaacatacacaacgtgatatggttgatgtattggcttgagaactgcatggacctgtccgaggtaaggatcaaaaagatatgacaccggaggaccgagattggtttctctcgcactatatctacgagaaccgcgttttcctcagtacgccacaagaatgcgtacctggtcgcaaccccaacggcggcatcaagaggttccaaccagcagacttcgtcggaaaggaggagctcgagaagctggagaagattgggccgaaggtagcaaagcttcttgaaatggctgacttgctatcttttcatgccaaggatgcaatatgccgctgcgctagatgtacctatcatcgtacgcctagctggttacagaagctacccgaaggtctagcatacgatgttcttcctacggcgaaacttcccgacgaataaataacggctcggcactttcttccttttgcatcgtagacgtctagctatgaattatatgtgcatgctcactcttctggcatgcccagtttgccgaccttgcttgtggcatcgtgatggccacgctcgtgatggcttactggtagcactcaacgctggttcgctggcgccagtgctaaatagcagccataaaagtacgtactccaagagacataatagtgtgatggaaattcgtgaggtttggccgttactgatagaccttttacagctaggttattggtgggaacttagacgacggttcgtaggcttctccaaatgcgacggtaaaatatcttcattccagtattgcccgaactaaaagatacttcaagtatccttttgatcacgatagggttaaaaacaccggatctatcggctgacgacgactctcaagcagtgttgttaaaagcccacctttttcgacaaagttgggcgtgtgattgaatctgggggattgggtgaaagaaggtgggttttctatttttcaaaaaaatcgacaatataggcttctgattggctcgtttggtctcaaaatcataaaataatttatccttggccaactattggactgtttgtcctaatatttgcactttaactctgcattataggcaaaaaaaacccctgcaaaacccaaatatgctggatttacccatagttccattaagcaaaaaccgaacttttacaaccgtgctctcaaggctccttcgtggagcgtttgcagaaacgcagacgtctcattcagcaccagcaccagtataaactgcttcgcagtatccctccgacgtccaatgtcgtcgagcggttcttcagtgttgcccgcatcacgcttgggcacgagcgcaacggactgcacccgattacgctggaacaaattttgttcctgcgtcagaacgcgagctattggaacgtaggtactgtagatggtctgcgtagctacgttaatacaaagttgcgcacttgcacagcaccattagaggatgttagcaaattggtattttaggagttggggacaaagacactcgaccaccgctgtctatgttcccgaactcgtaagaggggcgtcgtgttagtacggaatctcccgagaaactcgtaaggctttttcacgagtctacaagccttgattggctcgttactctcatcctgcatctccccctcgagcaccatggccccatggcgcttacaggtacatgtagcgccccgactcgattcgagtcgcggtggttcgagtcactcgaaccacctcatccagtctcaagtgcccccccccccctaatccgtgtgacgtccttgcctctcccagcgaggcacacgaggatgacgacgattcggctgcgcgtctgaacggcgcgtcgaagtagagtaggcagccattgaccacaaagagcagcataaagtagaatatgttgcttagagtagtgatatccgagttcctgatcgtactattggtttggggatgtcaacctaagaagatgcacagcgcctcgatactgtagcgtttgattctatcgcgggtgatgacgtcgagaaatgtagtgctgcgctgagcgcgcgaatcgcatcctcggtgaagcggaagtacctcttgcagtacgcatcgctgtgctcgttgagcctcgaacgcctgggatgatcagtcactcggggcgctcagagcgcgaagcagcatggcatcggatgcagggatctcgtgtatgctaacactgtcgacgatttcgttttaactaaacatataaaaatgttgaccgtaaatttgagtcgttatttacgaagttgctaacatcctctactatttatgtagggatggtactcatgtcattatttatgcagtggggttttcttgcaagcgacattatttatttgccgattctgtcatcataaatataaatgccataatcggcggccctgcccaatgtcgaaggcacgagcttgaccgtatatatacatggtggaaactaatccatgtgcagacgcgaatgcatgcaaaaactgcatacctctgatttatcaggcttaggttgctcgaagcaagcagtttggtaaatttaaaaaattacaaaactgaaactacttaagtattgtgacttgccagcaatatcttgtaccatgtggtatgtacaacatctggtgttctcaagctttgtcactgttaggagtgccgccttctgatgctcaccgacggttcagtccgcaatttacttttcagcctcccacttctactccaggaatgcgtgtttcctctcttttggtacttgctgccgacctgctgttcgcgtcgagtgaagccttttcattcgaatcgtcgcccaagctagaacgatgcacgcgaatcacggctcttgaggactgcgagagacgatgaagagagggtgatccctccaggagtgaccatgaacttcgcggggcactttcgcgacagcaaggagacggccaagtggctcaaggcttgggccaagaagggagaatccgaagctatcgtcgctgcaaaactgggagtgtccagcgtcccgcaggccttgaaaagccaacacgaaaactggcaggcgcttgtcaactacgcgaaatggcaaaaaaagtatttcgcacagcttggtacgggttaccaaaattttaaaaggacccagaatgaggtggcgcgctgggctgttgaaggtcgaaccgacgagtgggtcgctcgagtgctgggaatgtcgaatctgtcgaaggaccggtacaagtttcaccggaattacaaggcgttcgagatgtttcagaagcaaaagaaggagttcgcggatttactccagaagcacgcagcgaggcggaacctgcagcatgagcattactctcgcgcacctatcagctaaccagcaaattagttcgagagggaccaagcatagacgaaacttggtgttcaatctccaatgaaacgttagtctctggaccggaaagccttatcgttcattcttgcctcgcagccttttggctcgatgcaccgtagcaaatggtgcaaagtagcaggtcaagaaggcatacgatacatttttttaatgttagcaacatactctgtccacgaggaacgagataaaacaattccgcggtagaacacaatgcattactgtgtttagtccctaaactcagtcgaatggaagaagttatgctgaaagtgggtccaagctcagcgtgtagtgggtcagatctgcagaggtgcggtttgtctaacgggaatctaacgttacgtgaatttgtgggctctcggtggggaggcttgggaaaatttgagagttggtctttggacggaaaagtgacatttcatagagtcgatatgttgtgttgctcaaacgttaacccgcgttacacgtaaccccgctcctgcaagaactggttcagtagacaacagcatccgctgatcttggtccatcgagctctccgttttcattgagaccatttccctcattattgccactgataatcaaacatttcgagttcgtgcgtagtgggagcgagcgttctgttggtgccagttcttcgtgaagccgaggtatcgaactcgagatgtgagagatcacggatggaggtaacgatgccagattaggccccaatattggcacaacacgcttcagaatttgaggtgaggtccaaacgataccatgacacttcagttttaggccgaaaatttgcgctgatctagaaaacacacacaaatgttctaccagaaaaatacctaatcgatatgcacattgttgctctattacgatcgccttacatacaagatgctagcgaaccacgccaccgagtgggtggtgttccgggaacactgttcccagctcgtggcagccacgagcgacgtcaagccagtggcttgacggcctttatgcgtcctcctcgatcagcgacttggccagatccgagacgctgcgcaggtccgtggcctgggcgcagcgcagacacagctgcgtctcggccgcatccacctcgggcgcgtacttccagcagcgcggacacttgtggcccttggctggcgtcagcaccagcttgacttccatcggcgcatcgttggggcccatggccagctggcaactggccttgaactgctccgcgctctcgatctccgtctcggacgccaccacctccacgctggaacacaacagcacgtcctcgagctccgacgagctgttggccagcggagccaaaaagtcggcaacgcgcggatcggactcggaggccacgacgtacacgttgcactcgagctggctgccgacgcggcctgcctgacgcatctgctccacgacgcggttcacctcgaagcgcagctggcggatcgcagtccagtcgcgggccagctcgtcgttcttccactgctcggcgctgggcatccagccttcctcgaggaagacactaccaggaacctcctcaagtggaatttcgccttgtagctgcgatacccagtgaaggcgaatatcttcagccgtatgaggcaccacaggtgcaagagcgcgagtcaacgcctgtagcgacagccacaacaccgtctgcgcagagcggcgagtctgcgagtccgccgcatcgcagtacagccggtccttagtcgcctccatgtagaacgccgacaggtcggtcgaaatgaagtgcgacagcgcgtgctgcgcgcggttaaacgcgaacgcgtcgtacgcagccgtcaccgactcggccagcgagttcagctcgtgcagcatgtagcggtccagcgagaactgcatcttgtcgtgcgggacggcgtgctgcgccggatcgaagtcctgtaggttgccgagcaagaagcgggccgtgttgcggaccttgcgaagcgcgtcgctcgccttgccgacgacgccagggccgatgctgacgtcgccagtgtagtcggtcgtcgccacccagaagcgaagtacgtccacgccgtacgccggcaccttcatctgcttgaccttgggagacttttgaggcatgtcactgttcttcttggccttcttcttcttgttggcatttgagcccttatcggcgacgggcacaggcatcgtgcatccgttaatgaagtcgttcggcacgatggtgttgcccagcgacttggacatcttactgccgcgctcatccagcgtgaagccgtgagtgatgacgttcttgtacggcgccgtgccctgcatggccaaagacgtaagaagcgacgactggaaccacccgcggtgctggtccgaaccttccaggtacacgtcggcgcgaatctgtccctcctcgtttggctcaagcaggttcggcagcaccgcgtgccagctgctgccactgtcgaaccacacgtcgagcgtatcggtgcccttctcgtactggtcggcttggtcctgaagcgactcgggcagcaactcacggactgacaaatcccaccagcaatcagctccttcacgctcgacctcgccgtcttcaccttcaacgcggtacgacttgacaatgttctggaggtgctcgatgctctcttctgtaatcaacggctcgcccgtgaccttgtggtagaacaccgggataggcaagccccacgcgcgctgacgggagatacaccattcgtgacggcttgacagcgtagcctccagacgacgacgagcactcggtggcaccatttgcaccgagtcttcaagcacgcgcttgccgcgcgcgtgaagcgcatccagtcgcgcgaaccactgagccgtagcacgaaggatcacaggctgcttcgtgcgccaatcgtacgggtatcggtgatggtattcgttgattgacagcaggttgccagagctcttgagcagatcgatgaccgccgtgttgccttctcccactacactcaaaccctggagtccttgtcccgcctcggcagtgaagcagccgtcagcgtcgacagggcacaaaatgtccgggtgctcacccggtttcgagtggtgagccatccaggcgaagtaatcgtcctgaccgtgtcccggagccgtgtgcaccacacctgtaccagcgtccgtcgtcacgtgctcgcccaccagcaccaccgcgtcgcggttcacgagcgggtgcgtgaagtgcgcgccttccagatcggcacccttgagcgtctccagcacttcaagctccacgtccgtctcggcgtctcccttcagcatcgtcgcaaagctctcctgcagcgcgctcgcaatcaaatagcacgcgtccgaatcggcgccgcggggccgcaccacaacgtagtccagctcggcattgacgcacagagcctggttagacgggatggtccagggcgtggtggtccagaccacggccgacaacttgtctccatacttctccagcacactggccatctccttactagcattgctacccatggaggcgaagcggaacttgacgtaggcggcctgggacacgtgatcgtcctggtactcgagctcggcctcggccagcgccgtgcgggagctgggcgaccagtacacgggcttgaagcctcggaagatgaggccgtcgtgcaccatcttcttgagcacgtcgtactggcgggcctcgtactcgggggccatggtcaggtagacgctctcggcgtcggcgccgctccagtcggccaggacgccccagcgctcgaagtccttttgctgctcctgcacggccttgcgggccagctgccgggacagcgcgcgcacctgcgcgggcgacaggtccttggcctcgagctgcagcagcgtcagcgccttgtgctcgatgggcagcccgtggcagtcccagccgggcacgtagcgcacgcgccggccgcgcagcagctggtagcggttgatcacgtccttgagcgtcttgttcaggaagtggcccatgtgcaggctgccgttggcgaagggcgggccgtcgtgcagcacgaagagcggccgcgactcgtccgccgcctgctccgcgtaggccgccgacacgcagcgcgcgtgcagctgcggctcgcgcgcggccgcgttggcccgcatcgggaagcgcgtggccggcaggttcagtgtctgccgcatggccgcggccagcgccttggcgtccgcagctccgggcatggctactacgatctacaactccagctctctacagccacagccgctcgtgacacacaacgcgaagttagtgctaagttcgactcgtgtgccatacccacaataaggggttgcatcagaggtatcaggctcaatttgacgaattgacgtatcatgtcggcggcggcggaggacgccgtggcgcagctgctgtgcgtgcacctggggctgctggacgagggcgagctggcggccgacgccgggcgcgacttccgcgacctgtaccgcctgccgctgcgctcgttcgcggacaagtgcgcgctgctggcggccgcggaggcctcgggctgcgcggctgtgatgctggacgtgctgctcttcgtgtccgagacgatggcgcccgcgctgttccgcaagcagctggcggcgctgcccctggcgctgagccaatgggtgcactacctggtggagcagtgcatggtggccaatgagacggtgtcgctcggcgcgctcaagaacctgctggacctgtacgccgccacgcagcggtaccgcgagctggcggccatgctgctgtccctggtcttctacgaccgcgagctggagcgctcgctcaggacgacggacgacgtgctggacatcgccaagttctaccgccaccggctgcccgtgtggatcctcgacctgctgcacgagtatgtgacgctgtccaagctgcagatccagacggagaaggaggacgccagcacggcccccgaggtctgccggatggaggcgtacctggacaagcgggccaggggcgtgggcaacctgcaggccaactggaggatgcggtacatgcagctcaccgagaaggagatcgtgtacttcaagcacgacggcgacaagctcgagaagtccaggaacccgttccacgacaagatgggcaaaggcaacaagaagggcagcttggcgctcgccagaggcatgcagatcgagccgctggactaccgcggcaagttttcgttgcggccgtactgtgtcaagatttgcgacgcggcgggatcggaggagttgatcctggacgcattcacgcccgaggtccagcgccagtgggtcgctgctatcacggccaatgtgaagcgcctggagctggatccgcgctggttggcgttcccgcgcagatgtgtacatcgcatgactgtgggcgagttcctccgctactcgatgctttaccacggagacaccaaaaagtcgcacacgcggcacagctcgtgccagccaggcccgctccgcgagcagttcaacattgacccgaagcgttacctcttctcggctcttgtgacctgtgcgctggtgcgcgattggaagaccatggaagcgctggtgcagccgaagagcgctaagtcaacgatcatttcgctgttccccggcggtaacagcagcaggctcgctacagcgtcagcacccgcgtcctcatcagcgtggagttcgacgccagcccccgcgccatctcgttactctgtttggtcgaacagcacggatccagcaccttcctccagccggtcatctacctcgtcaaacgccacgcctccaacatcagctcctgcgggcaacacggtggtgcagggtatggtcgacgcaagcgctatcggctacggtgccatcctcgatatcgccgagcagagaaatgctccgcccaacttgttgatgctactggagtcgctgcatgagaagaacgattcgaagcgagggggctctgcgggttggagctgtcgtcgcgatgtggacgccagcgacgcagcgtcaatgaaaatcacgattgcgatccctgaaagcgtacgcgtggatacgacctgggggtgatgaaatgacagcttggacataaatgtaagtagtacatcaatctgaagctaaccttgtacaagaacgccaccaatgctcaaaggtatttttcagtgtataaggccgtgcacgagttgaaaaagaggtatttcgctaaaatcccatccgtgctctctcacatcctcgattcgctacccccggcttcacccaagagctggcatcatcagagcactcactttcactacgcaaactgaaaagcgtgtgcaaggtgtctcggattcaattcgttgtgttgctcaaaagttagcccgcgttatacataaccccgctcctgcaagaactggctcagtagtctccgcagcatccgctgatcttggtccatcgggctctccgttttcattgagaccatttccctcacggtcacagataacttcttctattcaagcgtcgtgataaatttcaagtgccatttttaagaacactctcgcgctagttcgggctgcagtccaactcgatggcatcgatgcggctgaacttgtccctatcgagaccaaataccgtgacctgcaaactcaaggacggatccagtgcggatttcagctcacggcacactgccgtccattctacagccttctgggttggtgcatacattacagcgtagcaaatgacgcccactagcacgttcgaaggcgccagacacgatttaattttttttatgttggctcgtatgcagcccctcgaacgccttgtaagcttacttggagatgtccttggagcatccacccatctcttcgtactggagaaatggtacaccgcaagagattgcaatggattgaagcaacttacgatgaccacgaggaacgaggtacggtgaacaattctacggtattagtacacatttcattcaggcgatcaccatgttttgctccgacggcgttcgaatgaaagaagttatcgcttcagtcaatgaaccaagatcagcgtgtggcgagtcagttctgcggggtttgcctaacgggaagcaatgtgaatttgtggaatcagcgtgaaggtttgagtaactttgagcgttgctttggactggaaagcgctcttttcgttttatgtgtggctcctcttgaactaactcgctatttagctgataggcggacgaaaggaaaacttatgctcgaccgttccgcctcgccacgtgcctcttgagtaaattctcgaaggccttcttttgctcctgaaacatctcgaataccttgtagttccggtgaaacttgtaccggtccttcgacagattcgacattcccagcactcgagcgacccactcgtcggttcgaccttcaacagcccagcgcgccacctcattctgggtccttttaaaattttggtaacccgtaccaaactgtgcgaaatactttttttgccatttcgcgtagttgacaagcgcctgccagttttcgtgttggcttttcaaggcctgcgggacgctggacactcccagttttgcagcgacgatagcttcggattctcccttcttggccaagccttgagccacttggccgtctccttgctgtcccgaaagtgccccgcgaagttcatggtcactcctggagggatcaccctctcttcatcgtctctcgcagtcaagagccgtgattggctcaagagccgtgattcgcgtgcatcgttctggatcgagggcttggcgggcgattcgaatgaaaaggcttcccggacgcgaccaaaaacaatgcattagctaatggtaatcgtttggaggaaatagctgctactggaatgcttctaattgtggccccctgcctggatgccggcctcacttacttggctccggtgcacattgttccgaggccaaaatgcctcaaaacaaaaaatgatcagtttttcgcaaagatgatcgagcgagcagagcgggggccccaaccagttcgcgggtggaaatgtcgtttttcccggcccaggggtctctagaggcgatttcctagggccgcatgaaagtcgactagaaatcggtcaagtggccccctagacctaaattaccgtagatatgatttgatttccgctttcacgatatttccgattttgccctggctttgaccaattccctagttgtcggaaaatgtagggatgtcggaaccgtcgcgatatggatgaatatccactctgttccaaccgctattttttgcaatcccaaaacgctcgtacttgacgagtctcacccaatgaatgccttaagtccgatgaattttggccaatcggaagcttcgctaaagtagggtatttttccaccattccaaccatatttggttggaattttgtcagaatatttttaatgccatacaactgtctatataaatgcatatcccaaaaatatccttcagtttccaacctgagtggtcggtacacagtgtttcgttcagagtgaaaagagcaggcaggctagcatgccgatcgcatcgcttgctcctgccaacagcatgaaggccaggacgacggcgatcaactcgttcacgatgttcctggccgcggagagcttgacacacgaagccacacaccgccttatcgacggggataagacatgtaaggtattgcgtattatactagacaagtatgcatattcgttagccacatcagccgaaaaggttatagcaaccaatacgtgtatagcatactatggcaacgtcaagaattggctagtagataagtacctactgcaaggagctttggttaaatctcagctccaaaacattctatcagggctgggtaagtattgtagtaaccgagaggagctcggcgacgagaagaaagcacccccgtgctctaaagaagacttagaagctatggtgtctctactgtactcaacggctgcgacggagagtgaatacctctacgcggccctagtcgtgatgatgtggtacctttacggtcgaagctcggacgcggaagcagtcgagaagagccagctatccatcttgcctggtaagtaattaattatcatgtgcttagcagaatcattttaacactgagggcatttatgctaggtggcgtcttatttcttcgatttaagcgggttaaaacagctttactacaaggcatctccttattcaaggacccaacaaattgcttgacatgtcctctgcaagctttggctgtggcgctgattatgcagaaggcaccaagccagcgcatgctccctcagttcatcgccagaaagcacagatcagatgatattgatgatgtacaggagcttacattgattgaactactggaagttgatgatgaccagtcttctatggaggaatctgaagcaccttcgacaaagcagccagttcctggtgcacaagcatacgtcaacaggttgctggttagtgttaagaagctcgccgatttgcgtagcattcgcatgacgccgcagcttatctcccattccttttgatgtggtggagccatgcatgccaacgacggtaccttggccgagaactggatttttgaacgtggcggctggaagttggtccgcgtcaacaaggccttcgggtacatgcttggtacaacccaagccgaccaaaaggtgtcccgcgtcctgagtggctggaagcccaaggacgggcggctaccaacgctagccgctctggacacgccagtcttggtccgcgctcgcaagatgcagcagcttctttttttcagcacgatagcgttcgctgacggtgccttgaacctcgacgacgacgttgctgatgcccttacggctaccctgttcatgcattaccccgaaatgttagtgctctgcccaagccgcccgcttatcacgaagatacgtgagctcctagcacaacgagccatcggtgagtccgagctgctggtgtggagcgtgacgattaaccaggcattcgtggcacctcctgcatcagaggcttcggctagtgctggtgaggagcagtcgcctgcgttgattgacctcatcaagcgtcagtccgatcagatcgacgtcttaatactgcagaataaacgactcgacgagcgcatattagctgttgaagcacacctgcaagcacttaccaacacagccgcaactcgatcagccaacaccgacaccacacttcctgctcccgagcaaccaccgccaataggagctacgacgacacgcccgaagaagaagggagcccagtcgttgtcgacaatctggttcgagtggtttacagcggagcctcgtgcgtaggtgtcgcgttttaaagaagacagcgttgtacgagtacaggcacatcgcagggtaccttatgctcttcttacctgaagatttcgcgcttgacacttcgtcgcctgcatacaaaagcgaggtcctggagcttggtgataaagcgcagcagaacgcactcaccttcttgaaatcgcacggctcctccgcggttgcagcgggttcggcgttgaaggctcttcgtcagatgcagaagcttggtaagctcgacgcgttcatcgcccaattccatgaacgcgttgaccaaggtgtcattgtcgatccgacgccaccttcagcactgccttcattcactcgactgaagcccgcgcaaggttgatctgctactgtaacacatagcaaaatacacgaacaaactcaaaagttaaagcgactcaccgcacaccaggctcgctgatcaagggacaataccaccgacatcacatgaatacatgaacaacatcatatttgggtaaacctcttcgtgtattttcttgcacttgttcattactacatcataaacaacactgcacaaaacataacgttagcataggacattcatagtgatgacatgtttgccttgtgtcttgcagttctcggccaccatcaatctgcgcaagaccagccagccggcagtgtcgctgcagccgcactcactggtcctgttgttgctgctgatgctggcctcaccggccatcaccccgcgcgaggccatgccgcagcacgagtcacccgtgtaatgggcctactttggctcactactttagcttacgcgtgtgcgcgtgtctgtgaggaagcgtagcttagtttaacttagagttaattatactcgggcctccgagtatagattaatctaaataaacgatccaaataatgtttttgggttaaaatgagaactgctatttttgtattatgtttctgacttcctctaaatgtaatattctaagataggaatctgccaacggctggttggcagaattctaatgctatgcatgtcgctcattggctaagagatgctgctctcagccaatagcagtcctaagtctctatggaccacccgttgtggtggtcgtaaatgtatgtagcctttggtgtgtctacaccaaggtcgagaaagtctttcgaacctctaacagacgtcgtatctgtcagagttacaagtgactgtagccacttgtgcgtgtaaccctgttacacccccccccccccctcaacggcacgccaatcaggaaattgaccattcgtcaattcttcacgttgggagaaagaaaactcgagctcattccgcaatgagctcgccgcagaagatgaccgccgccgcaacagagggtaacctctctgttgctcagtaccatgagcgccagcaggcaaagcgcgacgccctcgctgcaaacgccgcgtcggggacaacccagtcggagattgtcctcgaaggttcctctgtagtcaacgacgccgttgacaacgggagtgacgacgtagagatggaagagggcgaggcctcttccaacaagcgcaaggagtctatcgacagtgatagtctcgacccgcatgccgggtcgagacgccctcgtgaaggagacgactcggacgcttcaagctcgaagcgttcgcgcggcgagagcgaaactccgctctccgctgctggggctttaagctccccgcgtgaggtggcgtcttcaagttctccgcgcactgctcaggcagcgcgcgatccgtggatgccgtctgcgtcagagatcgcagaccgtgtgggcaacaccgtacctccaaatgaaattccgctgtacgtatgcagcgggatccacgatgatgctgtggcggaggagcagcactttgatccgttaacgaatcaaaggcgcgattaatatatcggactcttttacgagctccgatacttctccagctagaagacctcttctcgcagcaaagtgcctgagttgcaggcactttgtcaaagttggaatgcttttgttgagaacttcaacaagaagcaggctgcttaccgtgagcgctttgagacattctcgacgcgcgggaggctggagcagctccacagatcctctgtgggcgctggtattccatgcgctgtgcccgaaggccatcagtgcacgttgtgtcttccgggtgcggtgcgcttgagcgaccgcgacctaaacgggtacacgacgattcgtgtacctgagagtctcaaggatctccgtgccaagttcttggcacgcgaggaacgcgacgatcgtggggcttcgggcactgtaggcgaccacagcgctcgcactaccttcgcgtcggcagtgcgtggtgagcttcgtacgccctcaccatttccggaacgtcctgcagcaggacgtcccgcggctcccatgtatcttggtggggcggaaaccctctccaacggatacgataacgaaccggctgccggttcgttttagggatactatggttcacaatacgctcaacaatccagcgtgttgagccgcgggcgtcgcggatcggaggcggcggtggtgggaacacgccccgggtatggtctacctggggttgaccttggcccgacgctcgaggagcgggtcgctgctgtggaacagcatcagagccgggagttcaccgctctgaagcaggaggtggtgatcctgagggctcaagtcgctcaggcctcgcagaccgcattggacatctctgtcgacgtgggaggtcgcgtcgcacgcttggcccagcgcgttcacgcgctggagcagaggttcgctcccgctggggcttccgcttcgggccagccgagctaggtggctcctggtgccggtatggcttcagccgcccgacgtaaaaggtcggatggaggcgcctgctagatggaatatctagcgtgtaggcgttgtcatgccgtgccaacaccgtgaacggcccgatgaagcgcggagcgagcttgctcgccccgaagtcggaaactgcatgtttaggcaggttttgagttgctaacaaaaccaatgagcccttcttgaattcattagtgttgcccctaccaacattgtctgcgttcagcttctgtcggtcgacagaagctgcgatagcgtcttggacaaaccgaatgacggcttgtctgcgctgcacgaagttgattgcgtccgagctgaactcgttcagctcgtttcttgcagtaggcccggcctctgcgttcgtcttcgcggtgtctgtgccctgcacagacgcgtgcttcttcttcttcttcttgcgcgtagtcgcggctgacactgtgcaagtgtcagcggcattctgcggctgctgcgttgcagtcgtagatcctcccccacttaaggatgaagccaccatcccgagttgactcgggaggcgtgggtgcctgatggcattcacgtagaacggtgtatgcccggtcgaggcatgcaccgagttgttgatggcgaactccgccatcggcaggcactcgctccagtgttggaacgagttagcgtagctcttaagcacgtctacgagcacgcggttcacgcgctcggtctgcccgtccgtctgcggatggtccgcagtcgacatcgaaagttgactcccaagaagtgtaaacacttcttgccaaaggtgtgcagtgaagcgcgggtcccgatccgacacaatgtcgatcggcatgccatggtgtttgaacaccatgtcaacgaatagacgcgccgtctgcttcgcagtcacttcagcgggtactgcagcaagatgtaccatcttgctgaagcggtcaacaaagaccacaacgcccgtgttcccctggctgtccgggggaagaccgaacacgaagtccaaagacatggactgccaacactcccgtggagttggtagtgactgcaagggagcctgcgcgaaaggcgacgttgataaacctcgtaagcacggacgtacttgcgcacccatttatactggtgggcccagtagaagtctcgcgtgagaagaaggtatgtcttctcacggcccggatgccccgcagtcggtgcatcgtgatactcgtacatgatcctgagtcgcaggtcatggttattgggcacaacaacgcggtccgcgttgtcgtcgactgcactgtagagtaataacccctcgtgcacccgggaacggtgtgcacgagcacgaagatgcttcggcagcttctgacgagcttggtcagaaggcgctgagccgtaggccagcaagagcttcgcgtccgcgtcgtgcgcggacgcgaccttcacgtcgtccagcagtgacgacgtcggggtgctcgatcgcatggcgtcaatggcattgacctcggcatcagttgtggcgtagtcaggtcgacgcgagagcgcgtcggccaccacattgagtcttccgggtttgtactcaacccggaagttatactctgcgaagaatgagatccacctcgtcatccgttgcgagatgtgcggcgacttcacagccgtccgcaacgacgcgtggtccgtatagaccacgaacggtttgcttccgagtagatacactcggaacttcgcgagtgcgtacttcatggcaaggagctcctagtcatgtaccgggtagttgcgctcagctggcttcagctgacgagattggtagtagacgacacgatcacgaccctcgtgatcgtgctgcatcaacgcacatccgattgcgaagtcggatgcgtcacacactacgtggaatgggcgatcttggtcggccaccgccaagatcggcgcctcagtcaagccccgcttgactgcatcgaaggcctgctgacactcagcagtcaaacccactcggcgtccttcttcaggagctgtgacagcgggcgtatcatgcccacgtagtccttcacgtacttgcacaagtacgtgaccaagccaaggaactgccgcagttccttgacgttcgacggcgtcggccactcattgattactctgaccttctcagggtcagggcggacaccgttcctcccaacgagacacccgagcacgggtacctcgctcgccccgaagatacacttcttcaagttcgcatagagcttgtgcttgcgcaagcgcaagcagcttctggagatgcaccttgtgcatctcaacatcgctcatcccgtccgcagcccggctgtggacgaacacatcgtcgacgtagctcggtgcgaagtcgcgcactgagcgcaacaagtgcgtcacgcacctgttgaaggtcgcaggggcgttcttcagaccctgtggcgtcacaagccactcccagagcatgccgctcggcgtgctcacagccgtgagagggatatcgctctcacgcatgaggatcggatagaacccatcgtgcagatcaagagcactgtagatagtgctcctggccatcgaatcgatgattacatcttttcgcggtatcggtgtctgcgccggtatcgtcgcatcgttcagcttgttgtacgcatgaacgatgcgccagccgccctgtggcttcttgacacagaacgtcggagcactgtgcggggacttcgattcccgcacttgtccagctttgcgacgactctcaaagaagtcgtcgatcgccttgacctgctctcgcggcagtggccactgccgcgtgacacagtaattcgttcccggcacgagatcaatctcgtgttggatgcccttgtcctgcggaagatccgcaggaatctcttccggaagtacgtccgcgtattcccgtaagatctcgtagtagggactcgttttcaacgagtcccagctctgctcttcaaagcgctccttcttcgtcttcgcactgagcgtgtcctcgctctcagtggtggtctccatgaagaactgcctcagttcttcattctcgcgcttcgttctctcggcgtccgagagaatgcatatttgctcgatgcgtccatcgtgcaagtcacgcgcgaagcgcttccagctcatgactggaagcgaagtcaactccgacgcttgcgtcggagggttagcgagagtcatctccctgtaccggaacccggcacaggtacgcgtcaagacgttcaacgtctcgacgtccggcttttcagcctccgtctgcccggcagacattccttgtagcgtctcggccccaggccgagacttgcgcagcgatcttcgcatgcgccgtcttcttgttttgcggagcccggctccgcttggttctggacctcgtccaggcccagccgtggacgggtgttcttcttcagtaccgccggcgggttcgtcccgcgggcgagcgacttcaagcccggcttggtcgcccggcgcttcgtcctgcagcccgactgcacgacagcatgcaagtttttccggtgcgaaacgtttgcaaccgtccgcaccgcctgcagcgtcggctccccgagccgacgaatcaaattcacccaagccatcgactcccggagtcgacggcgttccgtcaccttggctcttattattggccagacctggtccaatcagattcgcgtcagcctccacggctgaggcgtgtgactcgcctgcgtcatccgtgccccttgagaccggagagtcttcctgattcgctgaaaagcgggtgtcgatctccgagatcaacacatattctccttcagccgtcggcggcgaccccgatgcttgctgctcttgcgcgcgtgctcgcgcgcgcccagggcgctcagaggtcaacacattttcttcattagctgtcggcggcaacaccgacgctagcttcccctgcgcgcgtgctcgcgcgcccccaggatgattcgggacagcggcattaggcgctgtctcgagtggggagtcgcacgcaccgacaggtgcgtgcgtagcggcaacaggaccatcgctcactgttccgctgtcgcgacctaagcgcacgagagtgcgcttctcccaatcgatgaccggatcatgtcgtgcaagccacggcatgcccaatacaatgtcaaacttatcgtccagatccaggacgataaaggtctcgacatactcttgatcttcatacgtgaagcgcacgcgtagcatgcgcttctcggtcttcacgacggcacccgttgccaccagtcgtacttccaacatacttcgaggtatctttaaattctcgaagtcaagccttgatagacttcgcagtcgaacaaagttcttcgatgcgccagaatctaccaaagcacggagagagccgcttgctctcatcgagttcacattcaggatgacaaggtcaggcttgtcatcttgtttcttgcagtgagaatgaacctcactgggggctgcagtcctcagtgtcgcgtgtccaaggtcgacacgcggaactgcattaccagtagggcgccccgcgcctactggcgtccagcgttttttgtttggttgcgacggtgcctggcaccgccgcaatagccaccctgctggttcacgggggccgtgcactcccgagcaaagtgaccgattctaccgcatcggtagcatcgcacattgtttccttgcgactgctggggtccagcagttgcagcactcgagaggtccatgggttctgggcctcctgtcctcactaccgggcgtggctgtcgcctcggtacatgtgcatgcagcttagcctgctgcaggctaaactcctcctgcattgcaagagtaattgcagcttcgagagtactcgggtactcgcggaagagataggtcttgacaggcccatctctcagcccctttatgaacgtgacgaccttggtcgcctcgtcgatcggattggtcacgatgttcgagaccaagtaccgtgctctctgagcgtaagcatggacatcatgcttgccctgctgcaggtcgcggaactccgccctcgaccggaactcgttttgcggtggctcaaacgcttgtctgagctcttccttgaaaccctcgtacgtgctaaagcacgtaggatccgagagtcggcgtccatacgcccaacttcttgcacgtccgccaagacatgacatggcgaacgcgaccttcgacaacgggtcgacgatgcgtcgagccgcaatggcagtgtcgagttcgacaagccaacggaggagaggctcgccctctcttccaacttaattgctcacgctgagcttcagcgattacgcgcgcggtgtcgtcggggacgacaccgtggtagacgaagcagcatctcgctgctccctcatgatgaatcccagagcaacaccatgttgctctgtcgccgttagcgtacgcagcatcgtagctacagccgcctcaccaatgactgttgacagtcgttggagaacttcccactctgggtccgacaggtggggacagtcagcgcgtgcaacgtgagttgcaggcgtagtggagctttccatggacacctccgtatccatgggaaggttctcagctccgcgttcgtgcggtgacgtacgaactcaggtagtcggtcgttggacggactacaaagtgctaccaggtgtaatgggcctactttggctcactactttagcttacgcgtgtgcgcgtgtctgtgaggaagcgtagcttagtttaacttagagttaattatactcgggcctccgagtatagattaatctaaacaaacgatccaaataatgtttttgggttaaaatgagaactgctatttttgtattatgtttctgacttcctctaaatgtaatattctaagataggaatctgccaacggctggttggcagaattctaatgctatgcatgtcgctcattggctaagagatgctgctctcagccaatagcagtcctaagtctctatggaccacctgttgtggtggtcgtaaatgtatgtagcctttggtgtgtctacaccaaggtcgagaaagtctttcgaacctctaacagacgtcgtatctgttagagttacaagtgactgtagccacttgagcgtgtaaccctgttacaacccgcctcttcgcactggtcctggtgctgctgacctcaccggccatcaccccgcccgaggcccagccactgtcgccgtcgccgccctgctacaggtgctgctgacctcggcggccatcacccagcccgaggcccagccacagtccatctcgctgccgacgcccgtcttgctctcggtgctgctggccggggggcccgctccgaagctgaacgaatgaatgaataggatttagttaggatgtcattaaaatgaaatagatgtcattaaaatgatttgctgtagtaccggtacatgttggacacttggttggagcgttggaattttgacggtatggacttgtgctcatcatacgcatttataatcaattcagcgcggtgagatgttgaagcgatttgagaggtaattaatgatagggaagactagttcccacactcacacgccacttcacatattgttagctactaacaccgttcggactccatgctcgtcgaaaagtgaccgcagcagccattgctcgctaaattttatcgctcgataccatcgagtgtcgcaggtttcgcgctaaaaaacctcccgggtcgtataaccctggaaaaccgatccaaaacagatttcacgaggaaaccgtgcgaaaacctgaaaaaaccgatccaaaacagatgtcaagtttttttcattggccgataatttcttctatacttaactcgattagacggggtatttgaagatagcggtgtgcatgctggaaaatgggatcgaccttcgggtacggcttcatagtactgtatcaagcacacgactgtgtgtatggagttcatacacatgtccgaagtacagggtacagggcaatgtatacagtagctgtagctagagggtccaaattgagattgcattgctaaggcattgcatttgtcggtgttggaatacaaagtttcttgccaatatccgtttctgtgtatagtgtagtatttttgctaatacgggtaacataaagttctggtccatagtgctacatgtacgtgtattaccctgacatagagcgttatcaacaacttagcatccattgcatttacagtacactgtagccggtattgacaattcgtagaaatcgcggatgtgctaccagatgtttgcaaggtacccatggcaaagcctaatgtatatcttcatacattggagctgctccaaaattgacacaattcttcatgacacattttttggagacgatatttgcgtcttcgcatattgtactgggtatgcagccctatttttgtgctcatgacacatttatttttgtgttggttttggaagagttccattgcgtgcgaatgcgcaagctatgtgccttcaagaaacgtggaaaatgtacatgcaccggtatgtacccactttgagtcacggcactttcctagcctttcatcttaccttggtttactaccgacaaattcgaaatttggaaggccgggggcacaacagcgctcggtaaggtgatatagtttttttactttgaagttataattaaaatactatagagatagtatttgtccgtgtggaggatcttccttgtttgtggtaaatatggtaagctgaaaatttctgttcattaaaactttccgcggcatcatttgtcgctgtgggtgagtaagtagtcaatgacgaacaagtttagctttttactgggcaacgttagtgctgctatcccagaccaaatcggattgcatccggtggtacatgtaaaaaaaaatgacccctcttgaccttccaccggtacatctccgtggaaaccggtatgaccccggtgtgacactgggtcctatgcgtggtcagtttgaaccggtatactaccgacgaaactggtatgtttcagtagaagtatgtattgatggagttaagtaaagagaacgcttgaggtggatggcctactctaccatagcactgacgcaaaggtaggcattttgcatttcgtgcaagcctcgaacagattgtaaccatgacttcatttcttttttttgcttacttgttgcggctgcttcgcagctaatccgtagtaatagcaggggaaatataccaaaaatttcctattccagcctccgcggagctacgggttttcatgtttattctgttctaccgactcatttcacctacaacgcacctgtactacagtagtaacttaagcttacatttatacgttttttctgggatagcagtaccccggaggggcggcccagcacagattaattcggcgtcgctggctccggtacggtagctgaagccgacgaactgaaatatactgaacatttgcgttgatgctatgggatgacgcgttctccacccatctacttgaaaattaattaactatattttcaatgaaaatccccggcggtgcgcactgccagcacaattcctctagtaattaacaatattttcaaagatgaaggtatacagatcaaagacagttctagacgccgcatgttgctatgagagcttgaatgaaatgagctcggcgggtgtcagctcccttgacgacgaagcttcggccgaatttgaagagcggaccgttgatccccagctaggtgtgaacggaaacaccagagatgttttttgttaggagctcagagacgcgctgcaatgggcaacacagatttacatacagcacatactgtactgaagtagtaaatttcgaagctcgttatcgacggcgcggcagggagatgccctacttacaagttccttagctatcccagcctacgcatagctctcgttacagtagtagtacctgtactatattttgatacgtgcaaaagtactaattactactggacgtgtcctgcttcggcgtcttagttattgctggcctcacctgatgatccgacagacgtcaagctcttatctgtctgtgggtatctcataatgggaatcctatcttcgtcacgttcgttttaactgccttatgcagtgcttccactttcacactctgcaatcccaccagctagccaacaaggcggaaccaggcttacgagagccaccgcgctcccaagcaacttccaagaatgaccaacgctgtatcgcgtcagaaggccaacaacgccaagaacgtcaccgccgctgcccccgccagcgcacaggtgaagcctgcctgtgccacagtagtaaagaacgcccaaatgaccacaaccgttgcaactacgcagtcgacgacgaagaacctcaacggcatcaaagtgaacgtcgtcaagaccacagtcgccaatggttcaaagccatttacgctcaatgatgtgacgacgtggagcgtgcagcgcgctcgggagattcgaaagacggacttcaagcggttcgccaagctccacaactacttcacagccaaggacgatgccgtggccaggcccatcaacagcaaggcgaacgccaagcgtgaggacgtcgacctttgggtgcgcagcgtcctgaattcgaagacgcttgcttgcatccagggtacgcaggagactcagcaggcgctgttatcactgatcaccgtgtctgccgcgctctccaagtacggcgaaccggagttggtccgaaagaacagcttcggcgagatggacaccgtcatcggcgcgcgcttcggcaccaaaggactccaatccaagcagcaagccgtaggtgtcagctttgtgctgcgaatagtgctgggcttggcacccgagaagcgtgctgcatgccagagtctgcgtgagattctggaacttatgagccaccagcgcctagtgctggcaccgacagcgaaagggttgacgccgacctccaacaaggttgctgaggaatggacgaaggtgaaccagtacaagctgaagtacatggtgaagcaagcgcagtcggacaagttccaggaggccatgcagcaactcggtggtcaacacctctacgacggtattcgtacgcaactccagcagattggtggcgcgtgggatgccagcaaggacaaacctgctctgcaggcgaagaaccttcgtcctcgctcaaaccccacggagaagggcatgaagcagcagaaggagaccgaacgacgcaaggggcagcatgccaagaactcccgtgtcaacgaaccgagccaattggagaagaagtatctgccgctggaggctgcgatgtggacgcaaattccgccagtccctgtgagtgtgaagaccgatcagcgcaagaatacacctccgactgacaaggtgcaggtgattccagccaagagcgccactccagtgaagagtgcgccactcacgggggcctgggccgggcctcttccagcctctgtggtgttgagtcggcctagcgccattgtgagcagtgcgcctacaatgtcggcgcgtggtggaaatggtagaggccatcgcgcgattctctccagggcgatctagctgagttctagctagactatctgacgccgaggagtcggttcttagcctgaatcctcgaagttaatgtcaatgcgtacaggaagaagatgagagttccagtgaagttgaagtgaatgttgcagataattgtaattaaaattacttctactgtagtagtgtacagagatccacacgtaaaacgtagatatgagtggggtaagttttgtatcttcgtggatgaatttcgggcgatagatggtggcattgccaaatcggagtaaggtctcaatcaaagtgtcaatccgttgtatcagaggagctagcgatagcacaagatgccaacagcattcgtgatcgttgcttacttattttctccggacaagcatttcatgagcccacacgataaatgatgattttttttaagttttaccatattactagtagtaaaatatggtttgtgaacgagtatttggtttcgatttcgaattcgcgactttcaagcgcatacaattcgacaaccctttcgtgcactaatgaacatgctgagatagaagcagtttctctacatgatctgggaacaatccggatcttgaagctgagtttcgatcgcttcaagcgcttacaatgctatcacaaggatacatgaattctatctttgagaacgtcctgtcggtctactcaaatacaaattcacttctgaacttgttgtgacagtatttcagctttaaaataactcgcaaacctccccaaggacttgtccacgctgtgccttggcgactctcgctttactggtagcctcgacagctgctgaatctaagcaaattgaagtcttttcatttcaatgtggtattaatacagtatggtcgacaaagaagacagcgactccaacaagacgagaatttgaagtgtcaaaggtctggttgagacaataaaatggagtaaagctgatggtcttcaaaaaattggaggtgggtgcagcggacaggtcgtgttacatgagaatgcgcgcagcgcaacaatgtggagacccgcagctcgattcgcggctggggatttacaacactggatggatgggcgcatatcaaaacggtaagtgctcacgacggtgtagttcaccgcattaacgctatgtagtggtagcttgccagcgacgtaaacgagcgaaggcgagaactttgtatttgaagtcgttagtatctctaagtgactacgatacaaaaaaattgaaggtgggcgcgaccgattccaatgtcataaagacctgaattcgaaagtggtgcgaagccatgttcaaggctacacgaggcaagaggaaccttcatgttgctaccgctcctctaattaacgacttgttatggagacggagtacacaatttgtcggcctctgctgcgaaacaagaaccaaaccaagcttgtcgactgcagaacgcgagactattttttgcaaattgcgcacgcgatctgggatgcattgacttcaatgttggacgcaatgatcgacgaggggctttgccatgggataccctttcagcagatcatcgatctctatcagtcgcatgcacgaatattgtaataagctactgtattgataacgcttcgggggcgatcttgcttagttgtgcaacgaattctccgccttgcctagaatttaggcgtccatctcggtgcaaagtgaagctagcactaattgtattcttcgcctagcgatgcaaactgattatggcaaactatcggcagaagcatcgacagtactgaaggcttcagtctgaagcatcatctaactagtatgaaaccgtatagatgggcagatgcatgttttgatcgtactttgcccgctactcgacgttgaagcctcaagcaatcgactgtttgagtatctcattctgtacctgctcttcatcttccgttataaaccaaaaccacataaataatcgtgttcttgattgataaggtaaactaaaagttgcaaatggttaagttcatataataataatgcttcgtacacggtgatcccgagcctgcactgggaatctatgcacgacatccagtgtctctaagattctctaagattgtggttgtacttcagttacagtacagctcaacacagcttcaagctgtgcagcacagccaccagcttttgccgatttgaaatggcacctggccgttcattctgcaattcgcatcctcagctttcgactgcgtccccggtccaggcatgcgtgtctcctctcttctcgtaattgccgcaggcttcttgctcgcatccagcgaagctttttcgtccgaatcctccgccaagctgtcgatccagaacgctgcacgcgggacccggttcttgaggacggcggcattggagacaacgcgagacgatgaagagaggggagtcaccatgaacttcgcggggcactttcgtggcaataaggcgacgaagaagttgctcaacttgtggtacaagactggagaatccgaagcctccgttgccgcgaaactcggaatttccagcgtcccgcaggccttgagaagccagcacgagaactggaaggcgcttgtcaagtacaagaagctgctagacgaccgcttcgcgaggtttggtaagcgctactacaataagaagagggcaacggatcagatggcgcggtgggctgttgaaggtaaatccgaggcgtgggtcgccggaaagctggggatgtccatgctgtccaaggaacagatgaaggtccacaggaatttcaaggcgttcgacctctttttacagtaccaaaagggcgtagcgagtgtccgcgtaggataaatcaagcagcttgagctggttactatctactgtagcagactaaggggctcgcataaacgaaaatgtttttttttccacttgaactggattgcactattagttaatgtacgaaaactaacacaactctacgatgtttttatgatttcgaagtattaataagtacaatttatacagatctacggtggatacgtcttctcttctccagcaacgccaggcgggtgagtgatctgcacccccagcctagtcgtccaggtgaagacgtcgaaatgtactccagcacttcaaggtgaccgaactcagctgcacaatcagtcgttgaatctccaccaacgtggtgatgcaagttcgcactttgttgggccagatagtccaccacatctaagttccccatgagcgctgcgagccacaacggtgtggctccgtcgtcgtcaacagcatcaaatgagaagagtgtggaggatttcgccagctctttcactagaggaagcagtccgaagaaagccgcgagatgcagggccgtcgtcttccgcgggtcaaaagacccaatcatcgactcacttgcaccgaagcgtggcgcgtccagctcaaacgtggggtcttgttgcgagccacactttgctccatgacggagcagcagcttgaccgtacgcgagcgtccattgcgaagtgctcgaagcaatggcgtgtcgcccaagtcatcgcgtgcattgatgtcagctccagcgtccagcagtgtcatcacaggccattctgcgccgctaggtggagaactgttgttccacttgatacatcgctgtcttcagtcgtcagctttacgttggcaccgtgagcgatcagcaacgcaagtccagcctgccatccaccggccgctgcaatgtgtagcgccgtccaccccgcacaatcgtccgagctagtcggatacacgcgcgcattgacccacacatctccttgtctattcagaactacccgaagccgtcgcagcttttgagccttgcaagcctcgtgcagagccgtctcatgatgtcgagcaagaccttgtaaggacgtgataggctcgttcccagtcgatagttcggtgtcccaaatgctcgaatcccggtgaagtcgcttcatcttcgtcttggatcgactcgatgataacgtggcgtacgttgctgtatcatgggataacagcgtcttcatcttgtgtagccaccaggtcactccactatacgcgccgtggtccacgagagccttggcgactaggaaatgacctcgatgcagagcgcaccgcatcggcgtggcccagtcttgggtacgtcgggcgtcagctaccgccccagcgttaatcagtgcgttcacgacttccacgtgcgcagcgtcatggagaagctgtggaggtgaacggagcgccacctcagcgttggggtagtcgcacgcgtggtgcagcggtgtcatgcctcgagcgtctctggcgttgacgtccacatcactcctagtcaccaggaatcgtacgatatccgctcgacccagacgcgccgccaagtgcagcggcgtgatcccttgtcgtcctcgagtgtactcgtcggggtctagtgctgcagccgcgacgaggaacttgagcacctgaacgtggccactttcggccgcaaagtggacgcaagagcccaattcaactccgttctgacccaaatccatctccaatggagccaacgcgtccacgcgcgccccatgttgaagcagaagttgaagtactcccagctggttgtagcgtgcggccagcagcagcggcgtgaagccctgtgcgttgcagatctccgtgtcggcgccgtggcgaagctgcatcttggctgcgtcggcccgaccgcagcgcgcgtacaagtgcagcgccgtgtccatcatccactcgggcgaatgctcgcactgctgcgggatcatcgtggcctctagctgtccggttggattatgagacgactgcaacccaaccagacaagtcgcttggtcaatggcttgagaagaagcacccactccagaacggacgccaagcgcagctgaaggcgccgcgagggttaccgccgcatcttcaattgatcagcgacttattcgcagtgaaggtctcatcctgaggcagagatcaagcggcagtgggagagaccacaagcaagtcgcttttttgatgtgcaatgctggagcaggaggggatggaccctgaaatgggttcgtcaatcgattggcgaaagattcgatcgaaaaggaatagttactgctgctatagtgagagtagacgcgaaaactaaggcttctccgcgtcttcaatcttggagtgtggggcggtgcgttcacatgcacgtcggattcaggagccatgattttttatcacttaagactgcgagcgtttttcgagaaacgaaacggctgatttcgagcagccgagtggtgcccttgcacgtcgcattatcggcatttgagtcgacggcgaagagaaataatgaaacaatgcaaaaaggagcttgaaaaaagatatcaatgattgaccgaaggtaatatcacctactcttccatttccaacttttccaagactaagaatcttacctagttttgttttacaggtgcagctaacatctacacgaagccaatatttggagtgcgattcatgccgagagccgtttgcagcgccccgaacggccttgaacaaaccaagccaccgaaagtacgaaagattggatcaaagttagattggaaccaattccagaggtcttatgtgcttgaaccatttctggggtcggagttgcgtggtttggagttagaactacaaccaagtccttgctgtatttcgtatctgctggttggccagcatagctctcagtttcaatatttagtacttcaagtaaatgacaatcgttggcatcggaagatcctcgagttctgtctacgagacaaacatcgaatctaaaagaggattttaccgctaatgcctggagatgcttgaagacaatttcacaaacgtgacaacatgcaagcgaggaatcatgcaacttggaaagaaaaaatattgaaacacgaagaaaatttgtgcgaaccattccatggatgggggtcgcttttcagtacggcaagtatattgaaagccgcagcgttgtgtagtatcgttgaggagttggtgtctgctaaaatccaatgaggcatctgcccaaagtgattctggaggctacatcgacgttttggagcttctgacgagatcagttgaagccgccgtcgagtacaaatgtggtaaagtggccttctatttgagcttaattcactgagtacaaatgtaggtaagcttagtagttttaaggcacatctgtctctcttggtaaagggctaatctacgatcggagaggcgacaggttcaaagtatttaggatctcacgctggctggactacatgtatcgttctgtcgacgccagccgattcatgtaaatccttcgcggaacaagtaagaggatgaggatgacgccacctattgtgctgcccgcgtcaaaatgaggttgaacgtaagtttaggcacagattgtacgctggttgccttcacgagtcttgctaatacttcggtattcactaaacttgtgtggcagcaaattatgaggcctttcaagcgtctataatcgattggtgctaagcggaatatttgtattaccatgggagactgcgagttttatgagtattcaccgtcaaggtttaccaccaagccagctacttctaaccatatttgaggaagcttagggctactcaggtgttggcagacagctattctacatatactcaactcgaaatacgttgaaaatgagcgcttattatggtatgcgtaccttcaggaagaattcaaacctttggtggtggtagagcaacaagctcttacatcactgagaggctgtttcttgtggggagtatgcttgcttagctttgattgaatacatgtatgcaactttcaagtaaggacgacatcgccttgctgttgctagtggcagggagtttgacgcatttgaacgaaatcgttaagagtcagctggatgttactggttttcaacgtagatctcgctcgctatcaaataagcaatgtcctgcgtgctggactggtattaatagttgaaagccggcgatccccttaccagtagtgcacgccccacttgtagccatgtcagggggttacaagtctgcaacccaatgtctcaatccacacataatgctaagggtgcgtactgcagttccgctggaataaaacgtcggataactctatccactggaactgaagcacacgctggaatgaccaatccactgttttgtgttgcagtgcgcgattttgctgtccagcggatttttgttgttgttgctattttccactgtcaaatattggaaacagagcgtgcatcagaagcaaacgtatagtggtattgagttgtggaggggacaaacccgtgtgccctgcttactgtaggacgtggcccaaactacctgagagagtgtcggcctgaatgacgggctgccttcctaccacagcggcgacagcttccattccataactccgcggtcgtgccacgtcaaccctcttcactgtcttcggcattgccatctcctccgccagcggtatgccgcgggcagccacagagacgcgcttgtgaatggagtccacccactctcttaacgaaaaagtgtctttgccaggtgccatctgttcaatccgctggatccatccgctggatccatccgctgtctgcccgaattcgggcggatgaaatccgctggaatatactcgaatttccgctagaattgtatgcagtacgcgccagctgatcgaccattccgctgtaatgcaaattccgctgaaattgggcccattccgctggaattttgttgtgcagtacgcacccttagtcttcctccatgttttcgtcttcgctgtcactctcgccactttccccaccactaaagatactgacgtcgctgtccgaatcgcgtcctgctgtttctgcttcgatatctcgaaacagcctacgacgactgctctttggacgccacgccagcgatgactcattgatgcggttgaacttgtttccattgcgacccccaattgacacttccatgaccattgaagggtgcttctcccggacagatgcaagcaaggctttagctcgtcgcgcatatacccctcggcccaattctgccgcactctcgagttgtaggggtttgtgatgcgcagatgaggcttcatggagcacaccgcagcgcctagagcgtcctcgtttgtctccgaaagcaacttcaaaaatgccactatcaccgcgtaaaactttgcgagtctgttgtgctcgtggccgccgatgctgatgttgaattcacgttcagagacgaacccacccgtgttcactgcacaacgcaagtagttgaaaatatcattgcccgtcaaccgagcgggtccaatcgtacactgaagggagcactcgttgatcctgcacgggttgctccttgtagtggtgcctcgcacctggtgtattgcagaatgagttaggttggatgatgctaggatgtctgtgctaggctaatatgcatggtagtttcgtgttgtgtagctggaggggtctttgtggtcgtcgcaggccgttatcgtcgccactgcactcatcgcaggtggcgccagctcttgcgatctccaacagtcctcctcgaccaagatgatccgagtctacatcttctcgttgtgcgggttcataaacttgatcatggccaggttgcgcccgtgtagggttgcgccgaggggcttcgtgaaaatgtcggccttcatctcagtcgtagggcaataggtcacgctgacctccttcttgcgaatggcgtcgcgtatgaagtgaaattttatgttgatgtgcttcatgcgtgcagtcgtcacgtcgttctccatgttcttgatcgcgctctggttgtcgatgtacaagtcgatattatcatctttgccgtgcagctcaagttcattcaggagctgcttcacccacaagcagtcctgcactgccgtcgccccagcgatgtactcagcctcggctgtagagagggcgaccgtagattgtttcttgctgtaccacgaaataggcatggcgttgatggtgagcagtcctcctaaagtcgactttgcgtccttgcccccggcccaatctgcatcgctgaagatggctgtctcaatagtgtgtaaggtgcctgcggccggggaaagtgcaacctcaactcgcgcgtgccgcgcaagtagcgcaggatacgtttgactgcagtccaatgagtcgacgtaggcgttgagacgaaacgcgccaggcatcgtgatgtctggtcgagtgcatttgctaatccatagtagtgacccaatggtctcccgcatgatgctagtgtcgtagaagggctcgctgtcctctccgctcagatcccgagttgactccatcggcgtagtcacggggcggctattctccatgccgcacttcgccagcaaaccgtcaatattggctgtctggtggaggtagatgccgcagtcgctctgctcaatgttattcccaagcacttcttggctggacccatgtccttgatctgaaattggctggcgagcttctgcatcgtccagtcggaatcgccctcacgctggctgacgaccaccgcatcatcgacgtagaggcccagtacagttagcttgccatcatgccaacgaaaatacaagcacgggtcaagctggctcctcctgaagccaagttccagtaagtagcggtgtatagtgtcgttccacaacttaccgctctgtttaaggccgtagagaccctttcgcagcagtaggcatttgcccatgggtaattggagtccaacaggggcgcgcatgtagatgggtcgatcgaggtctgctcgcaggtatgcgttagcaacatctccttgtcgaatgacggcataccactgagatgcgagggccacaatgaaccgcaggctcgcgatcttgagcacgggcgcaaaggtctgtgcgaagtcaatgccaaacttttgagtgaagccgcgcgctaccagccgcgctttgaaccgttccaattcgcctttgttgtcaaacttgagcttgaacaccgattttgcacttaacagatttccatcagtaggaatgtccacaatttcccaggtagcgttcttcgatattgctcgaagctcttcttcgattgcctgccatcactcctgccaataagggctgttcattgcctcccccatagttactggctccttgatcccgtcacgctctagtagtaccgcaaaggcagtaccctccttgagtacgatagtgagcaggacagatgccggagtggcgaactcttcgagaaacgattggggcagccgaacgtcatcgcgtggtagtgctcgtgtacctcgattcaggccaaagatgcgctggatggcacgcgacgtaagttgatgctgctctgcagggctaccagcccgtgcttcctcaccattagcgtcatgtggggtgttggtttcgtgctgttgatcgccagcttcctcctccttgccgctattgtctgcgtcgacagcgtccatgtatcgccccacggctcgcgagtccagacggtcaatattccggatgtgtgttgtagaaataacacgtttggttcgcgggatgagaacacggtacgctttcttcttgaagtcgatgccaataacaactcctctttcagcgcgcttttttgctgatcgcttcgttgcatgagcgatgtggctcgtacacttcgagccgaatttgaggatgtacgagacactgggtcgttttccggagagggcctcaatgggagacgcatggtcggcgttcgctcgagtcggcagatagttgcgaatgtagctcgcatacagaacagcatcgccccaaaatcgctgtggcaacgccgaggcccagagtatcgctcgggcggaatccatgacagtccggtgaaaacgctctgcttttccgtttgatgatgacatgcccgcctccgtttcttggtggagaataccccggttgcggaggaagcggccgagtctggtgctgccaaattcaccaccaccgtctgagcgaatcatcttcaccttggtgtcgtattgtcgctcaaactcgctaacaaagtcctccaaatgcccttccgcgtcgctctttttgcggagcaagtagacgcgattgtagttcgtagcgtggtctacaatggtcaaaatgtgtttgtgaccgagccgatccggggtcatgtccgtcttcaggtcaacgcacaaggtagcgcccggttcgtccgttggggcagatgtagaagtatcctgcttgttcttcgcgcgtcgagctaatttcgcttcaccgcagttcatgcagaaatccaccttccgattagaggcaatcatgccttcaacgaggtttttgtcaatcatgcgtaccagatcctggtagttcacgtgccccaggcgttcatgccactgctgaagcgtagaggtcgtcattgctgcgaaggaggccgcgccttgctcgattccaacagaccaaagcccagtcgaggctgaattacccacttcggcaacaatcttgcccgtcttgttcgtaattgtacactgctcctcatcaaaggtgcaggtgtagcctcgagcggtgagttgagccactgaaatcaggttgcggtcaataccttttgcgaagtacacgttttctagcaggacagtacgaggcactccttctgccatcgtcgtgatgacagtctttcccttctcagtagcggcgacaagatctccattcgccactcgcaccgacaggaatgctggctctatcgcgaaaagttggtcacggtcgatgcaaaggtggtgagttgctcccgaatccactgtccaaacatttcctctcgtggcagaagcgccgcgctcggcatcgtcggcagcgacccagacatagccttcatcatcagaatctctggatgtgtcgtcatcatcagcagcggctacgttcgcacttcctctggtggctagttgttttgcctgttccacgagtggacacgtgaaaatcttgtgaccaggcttcccgcacacatggcaatgtatttcaccacgatgaccagcggcggcaaaggcttggccgttattttgctgctgcggacgtcgatccgagttgtcgttgttgtttcgctggttacgccaatgctgatcgtcattgtggcgatttccgctgcggtggccatgaaaattcgggttccggcggtcagcatgacggtttttgcgttcatctcgcttcgcaccacatctgcgcccgtcacctttcagcttgtatagcagtcgcttcatgcgatcggtttccgcaacgtaatcgcttgcgtcgtcgggcactgaagacaacagcgtgggcgctaactcggggcatgcattgtttccgaatacctccatgaccatcttggtctgatcaccttcgatgaggctctcgatgaagttcaagtattccaggtagtcatgccacgtatcgccttcacgcttgttacgctgcatcttcgtgctgagttcgagttggcttagtttacagccaaactctgcacgcatcgcgcgcttcacatctgagtacggcatgctgtcaccattatgacggcgctgccactctgagttcttcttgtgatagtacctagacgctttcccctcgaggaagttgacaatcaccgaagccttgatgtcgccggtccaggtggatccgttcacgagctcctccgtccttattgcatgctcgaactcgtggatgaaattctcgaagccagctcctaacccagggtaaacctcgtttcccttgaagttcgagcagcgtacgtccttgattttaggcttcttcggtgatggaggtgcggtttccatgctagtatccgacatggagggggcacggggcgctcgcgtcgcgagctgcttcttcagttctgccagctcgggctgcagtcgaaggatgagctggagctggtcgtgctgctccattgtctcttggtccgaagggtcgaagtgcaggtcgtctggcagtcctaggcgagtattccttccatcttggtggtcttcgtcagcctcgttagcacctcgcgcctccgagtattcttcaaggtcttcgtggtcgcctcgcgacttcactggtcgctgcagaaggcgagccagttgggctcataacctgaagggagcactcgttgatcctgcacgggttgctccttgtagtggtgcctcacacctggtgtattgcagaatgagttaggttggatgatgctaggatgtctgtgctaggctaatatgcatcggtagtttcgtgttgtgtagctggaggggtcgttgtggtcgtcgcaggccgttatcgtcgccactgcactcatcgcaggtggcgccagctcttgcgatctccaacatacactttcgcagccacttgagacccgcaagagcctcgagtgtgcagaccgtcaccgtgtcgatgggcctcatgttgtcgagctgctcatctgacgcgtccaccatttcaatacattccaacagcgagcagtgtcaagccgcggcttcccagaattcatctctgtacacaaaggggtccacgtatcgctcctctccttcctcgttggcgcaatgatcaatctcaatgtagagctttgtcagggcagggcatgctcgcagcgcgtcgccagggcttgtagccgaattgccgtatcccgggtgtctgtcatatcgatcgactctcacgaccgatgcggtgaagtggcggaggtagctctcgtaccaccacttcatattcgccgaaagcgacagcgatgtcagctgcggcttcacatactctccaaatatacggaaaaatgggtcaccgaacgggacgacactccagttgaacgcccgtagcgccgtgcacgaagcgttaaacgctttccacgtctccagcgaaatcgaccacatttcttcgcacgacgctatatcttcagcgcctgctcgtatccgtccacgtactcgattctcgggcagaacctcgtcaccgcctcgatatattgcgggcagcatctcacatgttcctcgtcctcctcacaagtcggcatcgtcagctgccgcagtcctccacagctcaagtgccacttctccagcgcaggaactagagccaccaataattttctaaccatcacctccgtaacagtgccgaaaagatcaattttactcggcaaaatgaggatttccaggctccgacaggattgcgaggccgctgttaggattcgcgggatgtggcgactgagcagtgggacttcagtcaggtccagtctcttgagtcctggcatgtagccgaacaacgtttcccagtcgatgtccagctcgtctaactctggggctcagggtcgctgaaatcaaagtttctcgggtcgtgcggcccgcgacttggctcgtacggacccaaccgcagtcggaagtcacgcactggagctccgtattcttttatttcttctaggacttcctctacgtcttcaggacccgcgaaatcctccagaccttgataaaatattccatcttgaagggtttccgccatgggggcgatgagggcgtgggtggctttgcacaccagcgccagctcttgcagacgcttcatggggagcacccgcttgtgagggcccaggtctggctgcaggtccttgatggcatactggaggatggacgcgagtaggggcggaggcaacgactgcagcatttgttgccgacggatatggaagataccccacgaaatgattcaaataaatattgtgaaaaggatatcactttgaagaggttttaagattgcccaaataacattttgtttaagccaatcatataagagatcgaggttaagccaatcatataagagatcgaggtaaagcgaagtccacctatgatatttagccctttacctttttcaaacgagataatatggcgctgcaatttactaactgtattcgctctttggtttccgtttgtgcagcaatttaggaactctaatttaacctattgccaaaactataacgaccagaatactgctacactctatacatatagtaaaattcaccaaggtcgaacaggtgaaatgaaaacaactctcgagacgatggatatttttccattcaatatctatgccacccgtgcagccaatgtaggtttataccagaaacaactagtcttaccgttaactacgagttcatacctataagcactaggaagtcataccaaaaaatacgcgttcatacgagatcgtactcgtacattttggtatcaactcgtacttttttagtatgattcacttcgtaattcgcccagatcaaaaaaatttgccgatcatatattttttagaaaaagtgtaatcttggtgtggcatgccctgattgatcaaataacaccaaataaacctcaattgttgtttcagcacaaagaagttgcttccgatgacggcccatacaaattcctaatacagagattcgacttcctcggactgaaacaacgtctcacggcggccgaaaatcattatatagggttcgggctatttccatacaaacttcttgatagtgcctaggagaggctactattgaggtgttatttcagtcagagtcttcctctcgaaaaatgttacaataatcaaatactttgaaaagttatggacgagttgtagtcgctactgatgcagccatttgaacttgaacgtgtagtcggtgcctgtacgtataccaaaaaaatgtattcggtgcggttgttagacaaactggcatcgacaagaaaagctgacaaaagcgttttcgttttcgtaccaacatgctcgatagaggactgcagcacgtaaatgatccatagtacgaattgaccttgcaccacacgccactccttgtgcagaacgaagcgtagtattgttcctggagtgagctgaaatcgtcgagtaagcacaaccaagagcagcacgaaggaaaccaactgcagcagcccgtaaatcatcacgctgcgaactgtgtttgccagatcggtctcggacatttcgtgcagatacgggaaatacttgcggtttggcaggtggtacactgtcgcaatgtaaatcactgaaagaatagccatcgttagcgagtttgcagaaagaaaacagcaataaagcattatctttgggcttaccatagaccattggcaccatcacctccgtgtactcaaccagcagcaaaaattcaactcgacgtaggaggcggcaggtttgatgcacgaagttctgccgttctttaggggaaagctgctccatgatgcgaatagaggacgtacgggaagccatctcatcaacactaggaccgcgacggaatggggaaagtgagcttgtcaccgccggtacaatcgcgttcattttgactgacgctttcttcatccagatttttgacggcgaactaggcgagtccaatacgttctcactgttttcattggcctcgtgggtaggccacggcgtgacggctgctgtagcttgaagctcccgcgtaccttctgcttcaattagggtatcgggatgctggcggtatgcaatgagcgccgcgatttccaccatttgaactcgcgtagctctccccaactttgaatttagcgcatcaatatgcacgatcgtgttctgaagtccgtagagcgccgcgcaggctccaacaaagtcggccatcatgagcgtcgtagtcaccgacatggacgtcgagttgcgcatacaactcgacacgaagagcgcgttgaacacatcgacgttgaaagcgataaacaccggctgcaggtcggacgcgtgcgctgtggtacgatacaggagcaacttttccatcatcttgataatcggaagcgcaaaagtgagcagcaattgcacgctggcgtattctctagcacacaagaaggcgtagtaaaacaacggatacacgaccgctaagctggaggctgcgtagatgaagatggcgtgctttttcaggcattgacggacagtggcgctcgcgcgacatgtggggccaatgtaaatccagagtcctccgacgataagcgagatccacaccatgtccagcgtcaagtacgagaatgggacgggaaatccaaccgctaacgctacggcgaagtagaagcccgtatacactgctgaaatccccgccgacatgatgtagagccacacttttcgttctggaatggcgggtggtgcattggcagcagcaaagccagggtgaacgagcccatgatcagccagcaccggacccagaacatcccgttggctcgcggcccatcttctggcggggctaatgggatagcgtcggaggccagcgcgataataaggcacggtactggggttgctaccgccacaacgacgttgagtactgctgaggtgatgctggagctctgatggtcgaggaagtggtgcaatacctgcagtcgctcgagcgagtacgcgcccttgtgttcgacgtgcaccgcgtaccatgtccgccagcacgcgtcgtagacgccccaaacaagccgccaaaacattgtttggagtgatgaagactaatgttagagcaaataatagcatgtatgcttgtggcaggggaccattcgaagcctaattttgagttgattcaggcagctagaaaccgtcaagttgtggccgtttgtgctttataatagtctttcgattgactgactagagcaaacactcgaaccatttcagtggcatcttcgccttattgagaaatgcgtcgccgcctcgaaactgcatgtcgtagtggttgagtttcgtccgatagaagcggtccgtgtacgtatctccaaatttggacgcctcaatccctgccgagcagctctcaaactccactacgccgtcatttttgctcgatttgtgcgggatcaggtggcccaggacccaaaagttgacttggtacgctgagagtatcccagaaaagctctcgctgcacatgagagccgacacgtttgtccgatacgcctctcgagcggatttatacgccattcgcaggtagatggagctgtacgctccgtcctcgtataccaccgacttggacgcaacactcacggggcattggcttttgtactccgccagtaattccgccaggaaattcgtgctcccgacgcaggtgtcttgagcaaagtcggatcccatgctgcctcgcatcggcgctgccgcactaatccatgtcgagcttggagacaacgcacacagtccattcgccaacgctccagctaacatgagccctcccattgagtgtgtcaccagaatcgtatcattaatgaggaagtccgagctcgtattgctcactgcaagtgccctatcgcaaactttccgctgttgagtaacgttcatccacgtgttgttgatcgtgttgaggtgcgtatacttgatcgaggagcagcacggcgtgtggttggtgatattcccccagtatgtcgaggaatcctcgttgtccggagtctcatccttaacaccgagaccgtggatgaagatgcacggacgtggagtggacttacacgaacatacaggatcgtcgtcataccagagagagatgtcagctgccagtttccgcgaaccattcaccgtcactgaggttcccgtcagtagcgacttgcttgttgccgtcacggcgttcgactccacttcggctccacacttttccgagctgtcagtctttggagacacgatactcactcgactctcgagatactccacgtcaatatccacgtcccgactgtacatctgaaacccggagtcgctgacagcgcagacagcgaagtcgaaaccactcacggacgccttatacacgttgccaacaggacagttgatcttagctctcgcacttgtggaaacacttgagagagccgtagcttcgttcaatgctgaaactatggcgttgatctgagggaagtcgtccatgtccgagcttaaacactccaccgaagatgccgcagggcctgcttcgagaccaccgctcctcaagtacccaactccatccaccagagtgtagttgtactcgattgcgtcttcttggaaagtggcgaaaacgtcgtacaggacgctggttccattagcagccatgactgggttagcgtagacggagaaatcatcgtggccgtagatgtccatggtgttgcgcttgagcttgaagtggaaacgcagcgaaggccagtctctagtctccgatgcagacgagctaagcttacgcgcctgaagcatcaaattctcttcgttctgcgtcgcacttgtcggcaccgagagcgtcaagtagatcaccaagacgacaaagccaagcatcgacggcattttggccaccgaccgccacgagctgcagcgacggaaatcagcaaatgggaagcccttcgctgtaccggcacgcagtgaccagcgtaggactgcatgattacatgccgaagttcaatggagaaccaatcgccctaagtttaagcagatcagttccgcgcagccgaccagacctcgattccgtatatttcgcatgtcagctgaggaattgtgtattatgccagggctttcctgtaagattggccagggttttgatgatggactgcacctacacgtaccgtaccggtacggtgtacagtacataggtaatataccaccggcacaatacacatgaaatatgtaaggtggcctacatgcgcacagtgtgtgtagtgtagtgtagtgactacggtggccgtaggggggggcatgaaaaccccctgaaccagaggattttcaatacccgagcaagaaatgtccgcaagaaaagccaaaaggggtcggactttgctcgcgtcgaagtatcggcacacaccacgatcgaattgccaagttgtaatgaagctttttggtagatatcatttatgtacataaatcgaggagttaaacacatattatgcaggtaggtacagtagtgtaccgcttgcagggaattccggtctgatcagatggagggaggcacgttgaagattttctcgtggtttggcttataaacaacttcactgggtgagcagtcttgaggaaccccacgcagaactcggtacaacttgacagcgtagagattgatccgcttgagtaaagctcacgttagcatgcttacaggttgcgtctgccttcgggaagcaggaagatattccacacttattcggaacagtggacgaaaagatgcagctgcaaatatattttttaagttatctctattgcttcgaagtattctcttgagacgctagtataaccacatttacatccattttacagcaggcattcaaaccatttcagaggcatctttgccttgtcgaacggcgcatcgccctcccggaaggtcatgtcgtagtggttgagtcttgtactgtagaagcgattctgccaagtggggccaaactttgaggctggaaagccgcccgcacagctctcgaactccaccattccatcatttagcttggtcttgtacgggatcaagtggtgcatcgcccagaacttgggctggtagaacgataccagaccgacgtcgctctcactgcacattagcccgtccaccttcttctggtacacgctctgagcagctttgtacgcagcattaagaccggctgagctgcagttgccgttctctgtcgacatcgacttgatcgcggcttgaattgggcacatcccgaaaacatcagcatactgttcaatgatagcgttggtgttgtcggcacatgaggcttggaaatagtcggaggccatgctcccacccatgggtcctgctagacccatccaggaggaactggcagcgaggccgcacttcttagtggcaattgctccagccaggatgagattccccattgagtgggtgatgataattgtgtcggaaatcacagacttggtgctagagttgctcactgcgagggctcgattgcagactttccgttgcagtgcagcatccgtccaggcgtagtgctccgtatccaagaccgcgaacttaatcgacgagcagcacggcgcgtgttcctgcacctcatccccccagtagtcttcaaaggagtcttggctgcgtggaagttcctccttgatgcccagcccatggatgaaaatacacggtcttcgggcagatttacacgagcacgtcgatttcttcccccacgagaagtcgaaggcagccttcagcttcctcgtgccacgaacagcatcagcatcgagctttccagtgagtaaagcctgccccaccgacgtcacggaaatgggtagcgccgtcttggggcattcacgttccacaccgaagttcatagacgcctctaaatactccacctcgatatccatgtcactgcttcgcatcgtgaaacctgatggctcagcggcacacaccgcgaagtcgatgcccctactgaggccttgtacagtcgacctgtcgagcactgtacaccgtggggatcacttgaagcctctgtagctccattcagcgcagccacgatattgttgatcggagggagagagctagactctgactccaagcacttcgtcatcggagcggtggtcgtgcctgaactgcttgacaaataggcggtcccgtcgaccagcgtgtagttgaacgtcgtagagccctttgcgaacgtggcgaagacgtcgtagagcaccctggcgccgtctttagacacggtgggctcggcgatcatgtcgaactcgttgtgaccgtaaacgttggtagacttgcgcttgaaactgaagtggaagcgaagtgacggccagtcgggcgtagtctcattctgggagttcttctgctggtgcggagtctgtatcctgccgtgagacgctgtaaccacggtcgtcgcgagtgctgcatgcagcatgactgctacgagcgccaccacgccggcaagagaggacggcattcgacctctctctgtgaatgactttcctgttgttcggtcgaatagaaaaagcgaaataatgtgtcaccgctgtttcgtggccactttcctcaaagatgctgctgtgaatagccgaggtctatgcaacagtgcgtcatagagaggaagacagagcctaagaagcaggagagtcattaaagcagcattgaaaatcagcctcaatgtgtgggatcaataacattgatggggtccaatgttgcgtgatcgctaacattgacgcaaagtaaattttccagacgtgaaatttcatgtttggagcgactggctcacaacagctctcatttcagaatctaccggataggaagcaagcgctcgctccgcctccgcgtcgtgcgaccgtccgtctgcagcggtcacccgctcaaccttattctaatgtgtgcatgtcctactgcggtgcttatatgcatgtgtgtactacgtatgcgggagcaaacgccttcccagtgcgttgcgttgcgttaggcgcgatgcgtgttgcatgcaatcgaatgcgctatcttccaagcagtcgtcagcgcttttaatgcgcctctagccaacagcgcagttaggttaaaaagggagggcgagcgaacgcgagcgcgagcctcgctgagcgcgttcaccgatcgtcaacacccgccgatcaggcgggggcgggtctgcgctgctacccgatattttttttcctagacaccgcgcctggccgaggcgaggacttagcgacggcacttcggggggcccgcccctctctcgcttcgctcgggggggggggccgctgtgcggcctgccccaccccctcgtgccttacgctaagtccgcaggcgaaagcccacgcgagagtgtcctgccaactaggaatagacaacacgtggcgcccaggtagagctgcgcgtagatcccgtagagcccattctcctgctgcatgtgtcggcgcgtacaccatgacgcgcttgccgcgtagcggcggaagctgttggcgcacgccccgagtgatacagcgtgcttcgctgtcgtgctgtcgagatgtcgagctgtcgagctgtcgtggcgacgcgcgtccactattgtcacattggtaaaccaaatattttgctacgagagataccgtaacattgtgcaatgttaggcagaggcaccattgttgcgctcaatgttacgcaacgccaacatttcaatgttgctttaattagtgcagccttggtgacatcatacccaggcccagcttggtatgcagcatctattgatgcattggtggttttatctcatgcttagtatagagatgtactaaatcagttcttgctcaactttcccattctcctggaactttgttgctagagttgttatgctgctaaaaatgagttaatagctatgattgcaaacaatgtttttaacgttaaatacgttaaatattttctgcgataggaaaaatggtgcggtcactttcgtaattatcgaggtacttatccccttgaagttgaccttcacacactccacttttaagcgcttcgaatacctcgatgtgggccgcgcttaaggcttcccgcgctgtctgaccgagtgcaggggaatgcttccaatggcatacagtgtagactttaggttgctcgaccacatccaccatcttctccttactcgcacgctgcgcgcagcacgtctcgaaatccccgcaagtctttgcttcacaagtcaacttcctacgggctacacaagtcctctacaactgggccgcgactccgatgggccgcaaggaggaccctgtatggggcgagctcgatgtcgtcgtcccgaagtccaagccgacgtagccccaccccgatgtgtcgtgccgtcactgcggtgcattgatcatgaatgtccagcccggccgtcatctctatccacatatccgcttctgctccagagccccagcgacaacgaaggccacctgggcaacgtacgacgcgcagaggaagcgtaaggcaaggcctgggatgttttcgccgtcgaagagccgtcgcacaagctacagtggctctccagcaacaaattccccaatcgtactcagcaaggaggaggaatcaagctttcatctggacatcgcgatggtcttctacactgctggaatcccgttccgcgcgatcgagaatgcgtacatgcgcaagctgtttaagcgtctgactcctgcgttgaagctcccaacccggcaggcgctagcgaccaccctgctcgttaaagcctatgaactggagaaggccaacctggctgagcttctttcaaagcaaacgtttctggttatcatcactgacggctggtccaacgtaaaccgcgagagtatcgtgaactacgtgttgtggtcacccgccatgcgtccaatgatgtggtcatcgggtactacgggctctgaggcacacacgggggactacatggcatcggagcttctgcgagtcattgctgaggtagaaggcgtggccggcgctggcaaagtctccgccattgtgtcggacaacgcagccaacatgaaaaaggctggccgtctggttgaagctaagcacccaaacgtggtcttcaacggatgctcggcgcacgccatgaacctgctcctgaaggatatcttcaagatcaagttgtttggagacgtgctgaagaaggccatcaacatcgtcaagtttgtgcgcgctagacacctgctgctcgatcgagttcggcgttaccggcgccagctacaaaaagcaagaagggcaggcgagttagcggtccctgtgtcaacgagatggtacgctcaagaaaaatgcatcaagagcgtcgttcgcaacaagacaacgctgaaggcagctttggcggactcggagcttatgaagcactacacggacaaagagagtcaggtgaagctggacgaagttcaaggtattgtcaacgataagcagttttggatcaaggcgaaggttgtcgttcggctgacaaaaccggttacacgagcactagctgtcctggagacggatgcttgttcgaactcaaggatcctgcacgagtttcttcggctgtatcaggcgccagagtacactgaaggtatcgcagctttagccggcagctccgtccaagatgaaattcgcaagctgattgctagtcgatgggacttcattcgtccaccgtccgattccacgacggttccatacctgctggatccgtccaaggacatctctaacttaccgagcggtagccttgacggcagtggtggtgtcggatcgagcggagacagttctgacggaagctgccctatcaacgaagctatacccgaccctcaagacagtccgcttcgtaaggcggtacgctccgctgtaaagcttgccgagcgttttggcctcccacccgacgtgagctcagctcagtttcgcgcatcgctgctatcttttgtaaagacgaagaagaactggactgctgctcagagggaggctgctagtgaggactcaccactggaccggtggacactcgacgaccaatttcttgttcttcacaagttcgcagagaaaattttgagcatcccgacttcgtctgcagcaagtgagcgcctgtggagtgtgcaaggatttacatacagcaagcttcgaaaccgcctcaaggtcgcaacagtcgagaagttgtcgttcatctacacgaacaacggagatgcgaaaccaactcgactgccattgtacaagacttctcgtcggccgatagaactcgatagcgacagtgacagcaacagtgacgagcaagaagctgaagattctctgtttgacattaacgacatggagttcgagtatctcttggacgcagtcgtgagtgtggacatttcgcagtaatcgatttctttagtccttgccttcacaacaataaacgctttgcttctgagcgtaaggtgcactaacgttcacaatataacacacgctttgctaacacacactgatatcacatgtagagtgctattctagattaagatttcaaatgtaatccacagcaatgacgcaagccaacacccccactactgagccgattccatgatacagctgcagacggtggagtagcgaggtgtcgggcagggcacacaccttcttctgcgtttacgaatactcgcgcccagcaacgtctgcgtcgtggccattgacaacaacgaattgagcacccccgtccgcgcgttgtacaccgcgtggctgttgtcgggcaatgagaagccgagaagcgttgattcacttgagcgccagtccgcgactcgaacggcaccttgcacttcttcaaagccctctcaaggaggacgaggccgtccagccgtccgaacgcgaagacacctcttctcgatcgcacagcacagctgcagcgacgtcagatacagctctgtgtccgtgtcgttggggaaggccacgcggaaggtgcgattggtgccgtggctcgagcccttgtcatgcatcagctcataaatgctccagcagcagctcgcacttgccttctttcgtggcgtagtaggcagccgcactgcctatgaggccggcaccgaccgtcacgcggtcgtacagtggagtcgccatcacgacgcaaatcggggaatggcacgagctgcatttcaagcgcgttggaagtcctgtcggtccacgcccgccagtcgaagctccgcggccagcgccgcctccgcgagcgcctcaggcgtgatgtccgctgtgaactgcaccacgtcaggggggtagcacttcccacactacgcccacgtgcgtacttaccacggaaagctcgtatttcgcagccttcagaatcgtaaagtagaggctctcttgtccagcgagctgtcggttgaggaagatgtggtcttgacacagtacgtcgcgcactttgaagccgggcacggcgccgtagagcgtcacgcagtagtgccgtcggtgcttctccagcatctcctcgagcagcagccgtgtaaacccactctcgagcccctcgcgcaatgacgcacgcaccaaccgtgtaaacccactctcgagcccctcgcgcaatgacgcacgcagcacgaggttctagcgacacgtgtgcgagattccgatggccgtgttcaccgagaacacgaggaaatttatgatcttgttgagaaggacgctggcagcgtccacgaagccgaagagcgagtgatccgtgtacacggtcttgacgtccaggtacagcgctttggtctacagcagacactcgtgcatgagggtgaacgtggcctggtggccatgcacgatccgcacctgctcgcggacgcggatggcccggaacaacgccaagtggcccacgaacgtcatgtacgtcacgatgtccagcaagtgcatcaccggcaggtagtacagcttgtcatgtaacgcacgcccgcgcgctgagtggggtgttggcggcgccgtcggggccactctgaccttggatccgggaacggtatacgtgagcgggatgacattgtggccgccgcgcagcaggcactgcgagagcgatcggatgggcatctccacgccgaccagaagcgggaagaagtcgcagcacatggtgatgcacagccgccgcaccgtagtagcgagaaatctttcagcagcagcagcagcgtaccaaacagcatgttcagcactgttagagcgtgctgacgccgccacgagagcgcgatgtccagcacgggcgagaatgcactgtccaaaccagactagtagcatctccacgtagcgttcacgcgtggcgctgatgatcaccttggcacagtcgctgtgcccacggcggcggtgccccaagcacggtccttcggtctggccatccacagatctcagccccacctccttcatctcggccaactccgtgccttggggggggggcagcacgtagtgcaacgggtactgcgcgaagatggcgctagccgcagatggtagagtcgtcgtcgtccaggtcaggatcgagggggcggcgtccacgtcgggatcagaggtgacgtcgtaaggccgcggcgccgacgtacgtctgcaccgaagacgatagcccttggggcgctggttctgcatcaggtcctcgcggggcttacgcttgcgcggagtacttcgtcggcctgatagagtcctcctttgagaattgagtacatggctgtaaatacagaatagctgcctcaaatgggttcagctaaatcttgccttttaattattaataactgcgcgcaattttgtgattaactgatattaacgttaatatcacttttttccctctaaaatacaactctatttgttgcgtcttgttgatcggcgaatcgccgacggcgacagtgatcgcgaacgcatcgcggaccgcgtccgtgatgtgtactatccgtgatgtgtaccgcgaatcgcggtacatgttttcaccaggtgctgtgcacacgattggagcccctggctttgttttgcggcaaaacttttgcctactcaaggagaatgtatggaatcgatgccgtacagttcgctggagataggcgaaacgcgttgcgctattccttatggagggcatttgcagtacaaatgcgcgcaaatgttgcactgcaccaccacattttgtgggccttgatgcgccccgacctaaaaacaaatgaagaagagatcaacgactgtggagatgcgtctctgaagtctctttgcttctttatgattcacagagaaaccaggaaacgaaagcgtatctctttacttgaatttgtaatattacactaactgaacgtagaatgtacagaccgcctctacagaaatgtttctaaactcgtagaaatacgcatttagcaccactcaacctcgcacttcaaggtcgcacgctggactacccgccttctacctgcgccaccagcaacccgttgctcatgccactcaagattcctcgagttgaggcatcggcatccacgatggtgccgtcgctgttctccctcccgcttcctgtgctctcccacatcctcgagttcgcagtcaacgggttcgccaccgaagtggtagtaccccacgcgccctacctgtcgccctaccatctgcaatgcattgcatccgtgtccaagcaatcgctacaaactgtcaaagttttggctgagtaatgcagcgctttttcgctgactttaggctcggatgcttccatgacagcggaggatatcccacggatgtatcaattggcggagagcaagggagctgctgtacgctgtctgacggtgcgcttggggaggaaagagagcggctacgacccaacaccgggcgttctggacgactcggatatcgactgggacagagtatttagacacttgcccactttgaagagactcgatctgaccaagttgtcgttggtgagtagacacgtgctggagattctagaggtggcgtcgaagtattgttgctctttggaggcgctggttctacctagcagagggtttgtctacaaaaccactacgagtacacgaacgccgtgtatggagctccaatcgagaagttgacgacgactttgtatcaagcgctggagaggtggcacgacgaaaagactggggctggactacgacagctcacggtgccgacaaggaacgaagtggagcggcttcgcagcacgacggagtttctcgaagccgtgatgaagttttgtccgcagatagagttcttggatggctacgagaagatgaaggtgcacggggacgcccagtgctacgacatgtgggcggtcacgttggatacgtgggaaaagttcaacaagacgtgcacgagtttgaagaagtttagctgggcggttgttccttttgccgatccgttctttcaagtgttcggagaccacgtgaagccgaatttgatggagttgtcgctgtctgccaacgagtgttggaactaccatcgctacttccgtgagtgcgatggccagatcgtggctccacctccgaacgacgacgaggaagacgttgaggccagtcgccctggttacggcttgctggtctcggagatcactgcggtgctgagagcatgtcccacgctgacaaagctatcgattgcgatcgattatcgacgtaatgccaggtctcgctacgtgaacacgaggttgtacggggacgagttctggggggcagtggcggatcgctgtccacatttggagacaattacgatgtcggattgctcgggctatgccaactacagcgtcaagtccatcgatacgctaactgatcgcaccttgatctccctggcaacgatgaagtcgctacggtcgcttgagttggcgcctgctcgtctgactggcaagggtattttcgagtacctgcgtatctcgaaagaccaagagtttctcaagaacgaccttgctgttcagatccgagtgagtggccacgagcgcactctgcaggcaactccccgattctacggcgagatagttgagttgttgaagctacttgcggaaacgagcgaggaggatcttggagcggcggcttgtcgtcgtaagcctgagatctacattggtaatccgtacaagtcgaaggtggaccgcagttggtgcgagccgtacatgcgcgacaggttgatgccggttctagaagcggtccgagagaggcacccttcactagcgttgcaagtgtggctttgtgggcacaatggggatatcttcaaccgcatcgacttcatcaagctcaagtggaattcaaaggatgagtttgaccgccagctattcaagaatacgccagcggacgacgaggacgacgagatttaccgcattgccagtatgaacgagacaattagtctcggcagcggcgatgagggcgaagggggacaagttacggtccacaatctgcacagtttgagagacatcatggccgaaggcttgggtggagaaggacgctacttctagctacgagacgtttgatggtcatatgaactcaataccttgatggcgcttataaggtaggtgatctatctactgctggtgaggtattcacacgatccaggacctctgtcgtaattgaactacaacagacactcgaaccacttcaccggcatttttgctttgttgaacaaagcgtccccatacttgagctgcatgtcgtagtgattaacttttgtcctgtagaagcgatcacgccaagtgttgccgaactttgatgctggaattcctgccgcgcagctatcgaactccaccataccgtcattccgctgagagttgtgctgccccatcagtccgagcagccaaagccgagcttgcttctttgaaaataggcctgaaaaactgtcgctgcacatcagagcggacacgttggtccgataagcctcttgtgctgctgcgtaggcagcatccagcttggcggtgctatgacttcctccctcgtacggcattgactttaacgctgtagtgggagggcaccgcccactgtattcgaccattgcttctagcatgaagttggtgtttccggcgcacgattcctggatgaagccggacgccatacttcccttcataggcgctgccatgcccacccacgtcgagctggaatcaaggctgcatttccccgtagcgatcgctccagccagcatcaggttccccattgagtgggtaaccacgatggtatccgcaattctcgactttgtgctggttttgctgactgcaagtgcgcgatcgcaaacctgttgttgctgcgtgttgttcgtccacgtattgttcacggtatccaggaccgcgtacttgattgacgtgcagcacggcgcgtggtcggtcatgttgccccaatacggcaaggaatcctggttgtccggcaattcggtggggatacccatgccgtggatgaaaatgcacggacgcggagtcgacttgcacgaacacgaggtagaatccccccacgaaaaatcaaattccgccttcagtcgtcgcgtttttccagatgagcttggtctccctctaagaagcgcatttgcagttgaagtcatttcaaattgtggcacagtcgccgcgcattcacgaagctgttcttcattcaaagttggaactgagatgttcatccgcgtatccagatactgcattgcgatgttcatatcgtttccgtacatcttcaaccccgacgatccagaagcgcacaacgcaaagtcgataccatttacagctaccttgaacaggttgtctttcgagcactggatgctgcccattccggggggaacgctggtaactggtgtggcgtggttcagcgctgctgcgattgcattgattggcggtaaattgtcgggttcagggtccatacactttactgcaggagaggccgtgacattatcggcattcctggtcgcgtagtaggcggcgccgtcgacgagcgtgtaattgtggatcactgtgtcttgccggaaggtggcgaacgcattgtaagccacgtgtgaaccgtcaaccgatacgacaggatcagcgaccatggagaattctgactggccgtgcactgtcatggagctgcgcttgagcgagaagttgaatcggagagagggccattccgtcgtcgtcggaccctggaggttgggctgttgctggaaatcgctcgagttcccttccaaacttaccgaagcctgtactgtgagtgcaaacagtaatgacaagcgaacaattacttccagtgatggcatcgggccagtcgactacggcgcgtgacgttcggaaagaaaaatatgtaatggagcgggtgacgacgaccccgcacagcagcaattccatgagcgctggcagtgccggtacattttttcaaggcaaatcgaccaattatcttcctttccaattatttctggtgaacctgtcgtatcacgagttacgagtcgccaatgtacgcataccactggttaccagtggtatgatacagagagtagcggcaataagaaagggtcaacaacttataattctgacaacacataaatattgaattacacagggcctctatttaggtactgaatttgtcaaagtgatgtggcacacacagcagtcaaggttcccgcgcatttttcaaactccaaggacggagccacagtggctcaaccactgcgtgtgcatcaacgaccgttgtgcttcagcgccccagtgctcccgtcacacttactttctctcccacattgccccgcaaactgccgctaaggaagaccatgagcgcctgcaggttgatgcggaggtgttgtcctacgtgcacatattgggtttgcacaaactcagcaagcacaccgccgagacgcagctacagtaatgtgcggtggccatggacaagcaggacgtcgtagtgagtcacagccagtgtatttgacggtcgtgcgcctcaggaagacgagtaagacgacgatgccagtgccaggactccacccattctgcacacttacagagcagtttagcctcacgacgtccacgatggcgctgtcgctcctctccctcccgccctctctgctctcgcacatcctcgagttcgcagtctacggcttcgacaaggaggtggtgccttccccgccctacctctcatcctacctgcaccaactcaaggacgttgcactggtgtccatgacgtcgctgcaaattatgaggcagttcgctgcagatttcaaagcctcttcattgactttgggttcggaggaatccatgacggcggaggatatcccacccatgtatcaattggcggaggagaacaagggagccgctgtacgctgtctaactgtgagtttggggagagaacagagcggctacgacccgaaaccgggcgctctggatggctcggacatcgactgggaccgggttttcgggtacttgcccaacctgaagagactcgacctgagcaagctgtcgctggtgagtcggcacgtgccggatattctggtggctgcgtcgaagtattgccgaggtctggagccactgatcttgcccagtcgaggatttattcacgacaatcattatgggtgcacgaacgctgttcgtggagctccgatcgagaagttgatgacgacgttgtatcaagcgctggagaggtggcacggcagaaagactggggctggactgcgacagctcacggtgccgacggggaacgaggtggagcggcttcgcagcacgacggagtttctcgaagccgtgatgaagttttgtccgcagatagagttcttggatgactacgagaagatgacggtgcacggagacgcccagtgctacgacatgtggtcgatcacgttggaaacatgggaaaagttcaacaagacgtgcacgaacttgaagtctttcagctggactgtcgttccgttcgcggacccgttctttcgcgtctttggcgaccatgtgaaaccgaatttaacggagctgtcgctgtctgccaaccggagttggaactaccatcgctacttccgtgagtgcgatggccagatcgtggcgccacctcccaatgatgacgagtgtgacggagttagtccgtttcgcaacggcaagatccatagcgaatggtctccggcgccagcaggcaggagacctcacttcgagaaaacaccgctaagcaacaaacaagttaaaatctgctttcatcgacccggcttgtcactccgtcgaagtccgtcaagccgtccaactcccgcttcctcaagctgcatcgtgccaccgcactatttggggctttctctactaggttgctcattcaggggagagggccaccatatttgcaacaacgaggaatacacgccagccagtcgccctggttacggcttgctggcctcagagatcactgcagtgccgagagcttgtcccgcgctgacgcacctgtcggtcgagatcgactatctccataataatgggagagagcagtacgtgaacttggatctgtacggcgacgagttctgggaggcagtggcggagcgttgccccaagttgcagtcgattatcatgtgggatggatcgggctacgcgaactttaacatcaagtccgaggaaacgctaacggatcgcacgttgctgctgctggcagagatgaagtccctgcggtcgatcgagttggcgcctgctcgtctgactggccagggcattttcgagtacctgcgccgtatatgtcaagacaaggactttgctgagggagaacgcagcgtcgagatcaggatgggcggtcacatgcgcacgccggttgcccctcccaggttttacgcggagatcgtcgagctgttgaagctgctggcggagatcagcgaggaggagctgggagcggtgaactgtcgtcagaagcccacgatctacatcaagaatccgtacgagtcacaagtgcacaggcattggtgcgagtcatacatgcgtgacatgttgctgccgactctggacgctgtcaaggcgaagcacccgtcgctggggctgggggtttggattcatgggcggaaaggaaacatctacagccgcatcgactttatcagcctaaagtggtgtcccaagagcgagtttgaccgtcaactgttccacgagtgggaggaagaggaagcggagctcgacacttaccgcgacgccgatatgtacgaggagaatagtggcgacgaagactacgacggcgaggacgatgaggatgatgacgatctccctgagatttcggcccaggatatgctactctggagggagatgatgtctcgattcattaacgaagacaacttggctcagttcatggacgaaatcttccgccgataatttggtgatgctcgctttgagcgccaagagaccggcttatagcgctcgttgaatatttcgcaccaatacatttttataaaagcttaaaagctgaaaatcatgcacaccgaagtattgagctagatgcgctgcagtgaacgtacctagttacctgtacgatacggaaccagcatactaacaaaacacaaatgtgatccacgactacggtataagcttggcgacagcgccggctactacgaccagcaactttagtattgctacggcttgttcgacggtaaggtatctcgaaccaaaactggttccgatcactccagctgaaagctgctggatgcttgaacgacgagctgctcaaggtatccatgatcgacattgagctcgtgctgggcgtttccgagtcgatagggcccaactcttagaaaatacgaacgtttagaatgaactacaagccctgtaaagcgcaaattgatttgagtgcacaaatgtacgcaagcatcatccaactttgttttgcagtacacaaacagaagagagtcggtagatttttgagtacaaataggaaatgcgcagtgtgtcaccgctgccaatgctcatgataaaaccgctgtcgtggtacgtacagttcggccccaccatcgacactgtttcctcagtttgcatttgtcccgctgaacaacacacaatacgtcacgcggcaccgtttcttcgtcagatgtcactggtacgaatactcacgctggggttattgtttcaactctcagtgccagcagctctcagtgtagagcacccaagtcggtatttatcaacagcagcaccacctcaacccccaaagtccggcgcggaatggccctctctccgattcaacttatcgctcaagcgcagctcaatgacagtgcaaggccagtcaagtttctcgatgttcgctgatcctgtaatatcaagtgatggttcgcacgtggcttacaacgttttcgcctcattccaccaagacacgatggttcacaactacacgcttgtcgacggcgcagcctactacgcaaccagcaacagggataacgctgcgaatcgctcaagagtacagtgctttgacccagaactgggccatttaccgccgatcaacgccattgccgctgcgctgaatgacgccgtggctattatgaatgcctccagtgacgtcgagtgttcgtctggcaacgtgttcaaggtttctgtcaacgatattgagtttgtgctgtgcgcttctgggtcgtcggggctcaagctgtatggaagcgatatggatatctcagtggaacgtcttagcacgcgcatgaacatctcagcacccgtgctcatgggagacaagctacatcgctgccccgtagtggtgtccgaatttgaggcgactttgactggagaggcacttttgactggccggccgattccatttgaagccacaagacgactgaaggccgagttcgacttctcgtggggagattcctcctcatgttcgtgcaagtcgaagccgcgcccatgcattttcattcatggcatgggcgttccttacgagttgccagacaatcaaaattacttcaagtactggggcaatttaaccgatcacgctccgtgctgcacttcaatgaagtacgcggtcttggatactggcaacaacacgtggacaaacaacacgcagcagcagtaggtctgcgatcgcgcacttgcagtcagcgaaaccagcaccgagtctacgatcactgacactatcgtcgtcacgcactcaatggggaatttgatgctggctggggcaattgccaagggcaagtgcagtcttgaccctacttcgacatgggtgggtctggcagcgccgatgaaggggagcatgggctccgactttattcaagattcttgtgccggtaaaaccaatttcatgttcaacgcaatatcagccgtcagtggacgatgccctcccactaccgcgatcaagtcaatgccgaacgaaggagggagtcacagcacggcggaattggatgcggcgtaccgagcagcacaagaggtttatcggaccaatgtgtcagctctgatgtgcagcgaaagcttttccggattgctatcgacgagacaacctcttctttggccgctcggaatcgtgggacagcatcactctcgccgcaatgacgggatggtggagttcgatagctgcgcggttggatttccagcatcgaagttcggcaacacctggagcgatcgcttctacaggacgaaactgaatcactacgacatgcagttccggtttggggacgctttgttcgacaaggcaaagatgccgctgaaatggttcgagtgtctgctttagcgcagacatgaagttttgatacatgtggatatcttcgcaaaactcagcagcaagcgttccttgataaacctacttacgaagtagtacactaacttcatacttctctggcccacataagaaacaacacttcggttttctggacataattttttataaaaaaatcgtttggtgactcgcaatacctcaaccgaaagctgtgcatttgctccgtttcacgctatgatttaaaaaaaaacttagcagcagaaagaagagagaaacagccttttatctgaagtccgttttaagcaacattaggttttttagcgaggtgccgtcaaaaattagcgatattagaaaataaaatatcaccgtaatcgcgagtgactgctttacccttatgttcggttgtcgatgttcgcagttcgaagaactgtaggtttttggatgacatcgaacgacattcgcgttacattcgtagcttccggatgacatcgaacgacattcatgctacacgggaccatcggcacatcatagatagataaatgatattgaagccgactagaacaaataataaaggtgcaattgtgtatattatagctatttctaagctgtgaaattccgaacactgaagctcgacaagaatgcaatgatttctgttttacaacgactgggcttcgacccataccagtgagtttgcctaaagaaaagtagtcgaatttgggttcaacatcaaaatccaagttgcccaagtagatattactacagtttaccatagctagcgacacggcttgtcaaaaaatagttaatcaacttcttcttcatacgaaaacatcatggccgcggtgtgatgatagtgcagcattcaccctgaaacacgtgcgctcacgctgggcgagaagaactacatgtgcgttcgcattcctgtcgaggggatccaacgaacgacagattcgccaaatgtcgacacaccagtgaaaggtgattttcactagtgatgtgtgaagagcagggaatgaataattcaatttgtttgcacaacgtctgggcgtacgttgtactgtataaacttttgttgcatacaaaagcaacactgcgtgttgtgtgtatgccatatcgtgtcccgggtttggggcatttttcgcagagcagactactacttccgaattacttcgattttgcgttggccatgctaccgtaactcgagcatttaaactgtcaattcgaccttttcattctgtcatgggtcataacttttattataccctcctctttcagacacacgagaagaggatttcaccttgcgatcgattttattctgtatggatagttaatcagagagattaactgaaaatcttgtgcaatttttgtggcatacattgttgacaggctggtattgtgtgaatccccacacgtattgaaatgcgtttaggtgtattagattgaacattccactgagacttcgccaaaaactacttcaattatttttaacgatatgtgatccaaaatgggaggtatatcttgagttttccgttcaacgattttgtatccaacgcaaacgctatctagcagagggccaaagagctgcacccgatggtacgtcttctccggagaaaaggctagaagctagcgcaaaaagaatgacgaccgtgtatgaaactggaaggaacctagttcaaattaatcgagctaggaatggctcatgtgggtccattaaaaacctagctgctgtcgctcaggcattttatctagaaagactttggttggtattattcttgctttgtgtgagactacattgcgaccagcagggattccccgagcacatttactactggtggtgtattaatacaattatgcactacttgatcctgttcttgtcaaacaacttcgaagtacatcgttaccgatgctagtttagaacatcctaatgctacatgaatacggtacggccagcttaatacttgataaatggcaatggcatacttggacgaatggaagcagacacgggttttgttgttagatattcaggcgacccggacgaaatatgtgtgtgactgcgccatgttgtatcaaacagtgtttgaatgcttctaagtacgtcgtcgctgtacgccccggattcctgcgcgagaggaagcccgagcggacagtatcaaagcgaagggcaaatacccggtgtatcctgctcctacacgcgatcgggatctgctagaccccagttttgacttatcaaatttgaaacaaattgctggcttcatccgttttcccagcaggttcagttgagcagttagcctggcagcgctaaatctttcaatacacggatttttcttctttgtctcctccggtaagtttccgagcaaaacacggaaaaaaggttctgcctaggcatcagcgcacatttcagtgggaaggacagtacgttgattagctagttgtcgatgatcgttctacaaaagaactaaaattaaaactaaatccgtgaaatattgatccgacgagcaggaggagcccgaagcgttgaagtaccaactcaactaaactctgcgttgttcaatccatcggagtgacgatatatactgtagactggcaatgccttttgaaagaagcgatcaaacttggtacacttggttgtacagtggtagattaggcagatgctgcggctgcgaagcaggtgcaggtgcaggagatgcccgaatacatcgtttccctctacaagtatccgtgcaagctagcttcgaaatgcgaacccccccgggtccaccacccgggtccccaattgtagcgcctgttggagacgagttagaagggctacagctttgaggtttttctacgcgattatctcgacatgcgcagagacaatagtaagctgaaacagttgattatacccaatcatatgtggcatgtggtccacatcaaattgagtttaatgccgaatgttgtttcttgagtgggccagagaagtaccgatttaaaggagcgtatagagtctctcgtgggtgtatagtatagacccacgagagagcggaactgatcagtgaatgggcgccttccaaaaccctcaccaaaagtcgtgcataaaagtttaatcacggggaattgtttgatgagaccactttttggtctcatcaaacaattctaatgcgactcttaactagcaacgtgattaaacaagtgactgaactccactatactagaaggtcgcgttccagcaaccgttttggggcgcatccaacgcttcggtaatttaaaataaattacggattaaactggtcaaacggttttatatgggttttggaaggcgcccattggaacagcctgttccaacctgttccgaacacgtgtcttatctcgtttttgtatgtacaaaacgtatgttacggcagtgagcggttgtgagcagcgtggccatagcaaacccgcgcggtatttgcggaggcgggcccagcgacgagcattccagcgaacgaacccgctgccacaactcggagttagttttctttatgcggaggtctgggtgtgcaacccccagaacaccttttaggagatctgttcaaatctctgatcagttccgtatatgatccaatccggaggtaaccgagagtgcgatccgtgagcgtcttaatggtctcaacagccattctgaacgctcaggtcatcggcctagattatttgagaccgcgtcgaacaaaaagatactaatcaaccaaagtacgaattgggatttaggtacctcgttggaaagaggggcgtcttagctatcttttgaggccctccacaacttctaacagttagattagccaaagatatgtccccgcgaaaaaattatctcccgtcccagagcaaaagtaagaatttttattggttaccctggtgtaaaattgtacagcggatccaatgatacccttcgtttcttcaaattcgcattgaaatagtcttaaaacttcactttcgtgcgatgtttcacattagtgacacatgctgtcaattgatatcattttggattagcatggacataagtatcacattgattgatcagctgggctagacgacggacactgctacactttgaactaaccagagactgcagctcttgagtctttctctgaaggcagcgacgctcacatttatcagctctgataaggcctgtcaccttctggtgaacatcaacctcgatcaaattgatcctcggcttgctcatcgtcttcgattccctcgctgtcccccgtcacctctctatcctcctcagctgactcggccgtgctccaatcttcatcattgctttcatcaggctcctcgctctcagacgagacgtcgctggcggcatgtgccgcaacgtgcggggaggtcacgcggagtcgatttttctggttgcgctgccaatcggttcgagaaggcgtgcacaccggtgattcgtgcagctcggaggcactctcctcctgctgcggctcggaggtgcgcgcaagctactgcccaggcgctgccgaagcgtgctgctcgggcgcgtacggtgtatgctgctcggggggaggggggtgttgacagggaggggacccgggcggctccgaggcaccaacggactgtggcgcgagagcgccggaagcctgtgtgccggcgggcgacgactcggtgccgctggaggtctgtgatggcagctcggaggtcgagcggtgggcttccatgtcggcgatggtgtagatcttctttgagagtgaggtgttgagagagcgttcgctttagtgacagttcaggttttcaaatcacaaatcgggccctttctcgaaacttcacttagatacgaaaaatagcagccaattctcaagcgcgattatctcgataactctaaatggtggcttagtatcattttgttcgaggcagtctcatttcttctcaatggaagtgttatcatcatactaggtacaggactttacaccttttcaacttgaaaaccgcaaattccaagttcaattctgcaaaaggtaagttcaaaactgcacgagcatagaccaggctagcttcgtacttttaaacacagctcgtcggccacagcttgccaataggcaaatttgtactctatacatgtaatcgaatacgatgatacataccatacaggatataccacccctccgacgagactttgggcggagagacggttttatcgatataccgtctccccagtcggtattcccggtattcccgtctccccccttgaaaagtgtttggaaaaggagacaaaacttccgtctctcctcgtcgtctcattttagagtgctgcgtactttacgcgctggtcagagtctcactggctccttctgcgattggtcaaagcaatgcctaaaactgaggcgtactttgcctttcagcaggcctttcgacaggcctggctgcaatatgttgcgatctttccgcgaagttcctacagaatacattaaaacgctggttccctattatatataggatagattatggaccaatggctctctcgaaacgggagacgcagtacactatcgtatcttctaagtgcgtctcccgtctcgtggggggagatcgtctcccccgcgtctcggccgaggggtgggatatactatacatttatagagtattgttgttttgattttaccttttgctgttttgaacttgcaatttgcagttttgaagttgaaaaggaggcgggcccggatactcttttgaccacttttcttcgcccatcccagcactcgcctttaggacataactccgccactgcaatgataagtttcgggctgcaacgggaacgatctccctcgtttctcatcggaatctatgaccatactcagtcgagggactcttcacaaacttttcaatctcaagtatttaagttgggccatctctttcagaggaagaattataaaatctacgtgtcggcagaacatcaatgcagtgcccagtgtatccggaaggttaatggccttttacgtagatccggcctatggaggtgctcgaagacgaagcggtattgaagccgtttggggacgcacgacaaaagtcgctatgctggcgccagggtcgttggggtctgtcgatatgtagtgggggcaaaattcttcggcgaagcaagtgtagcggctattaggaaatttgcgaccaagctgcagattgactgtgtaacaggtctaactggtacatctggtctagaatgtatgaagatcggggcttgaagttgagcacgtcagtgtggaccacgcgagggagctgagggatcagcagcagtgcaagaggtccaaatggaagtcagtccagaattaggcgagcagcggacaggacaagcgggagacggtagcgaactggacaagcagagagcagtacacgacgacggcaacggtggacgaatggcggcgagcgtcgaggaacggtagacggatgtggctggtggacgagcacgtgcgggcgatggacgaagttgccggtagggccacgcggtagagctgtggctcgagtttgctgatggctgcacgaggtacgggtaggcgcgtgtgggcgtattcccggtggctaagtgagcgtcgcaacagtttagttcgtagtttgctagtgatggtcgagtagttgcatttacgttctagagacgggcggtggacgagcacgtgtgagcgatggtgagcggtgacgaacgaacgagtgtcgatggacgaacggcgatcgggtgacgaacgagatgaagatgagcaatataattggagccccgcgagggtgcctccgccgcggagacgtcagttgagtctccgtcggtcatctggtgttgttcatatgagtaggacatgcacagacactgagcaagctaagtgtctccgaggtgtccatgaaatcgagatgtctgagcttgtacgacccgccggcaagcaggcgacatgaggcttgttactgtagtggcgggtttcatagaagcaagcccagcccactcagtgggtgacgtctacagaacgacgccaccaagctggcactcgtagtgttccgaaacctactacaaagatatctttagttgccggttcaagcaacaccgacggatcggagaagaagcatgacgacgacaccttcgaaggacggcggagagcaggagacctttctcttggcggacggacggagcagtgacaacgcagtacaaggaggtgactcggcgtcggaatcgactgatagtcgtcaggctgcacgcatgccgcatccatttttcgccatcgtgaatccgcccagggtgtcatccatggcgcgcgaagcgcttgtggagtggttgaaactgaggaaggagtatgaagaatacgtcaaggaccgctgcaaggacggaaaagaagacgtcaccgcagtgatgaaagcgtgaagagttcgttcgacgcgaacgtgttggagaccttgtgtgaagtttgttggggagtggagcagagcagtgtgactgatgattttctcttggagaagatccacgagatcacggacagcttccagaaccaggaactgcctgatgtgaaggagttgtttcgtgaggagctgcgaatgaacatgtccaccaccgacatcgacgcgagagtgattgagtactttcacctgtgtaactcgctgataaaaaacatgtgttcacgagtttctttgaagaggagcgtggtgctaaggagaagtgcaagctcatcgtgagttcgctgccgaaaggactgaagagcaaggtccagaacgagcttgactatcgtgttccggaggcaaagtgcaatattcggaaattgtatgagctggttcgagtgaaggccaaggaacaagcaattgaagaacgagcattgaagaaggcaaaccctccgcgtcacaaacacgaaaggaaagagcacaagcccagttcccagtacaacaaacgacgcaacgaacaagagcaccgcgcggtcaagaaagtgaatcaggggaaagcctctgaccgccgccaatagaaaggtgggcagtcaggacgtgcagccgccaagggagcgccaaaagaaaggtgttttcatagtggcggaccacactacttgtccaaatgccccatggtcacaccggccgagcgtgacaagctgctcgccgaccacaagcaagacagcaaaggtgactcgaccgacaaagggaggcaccactagactaaaaagaatcaaggactgttttcccaagcagaatcggttcgtggtgctcaaagtcgaagtggaggtcccgctttgtattgacagcggagcggaccgttgctgtttggatgagagctgttttgatcgattggtaaatgtaaagtcggacattatgcgggtgaagttggacgaacctctggagtgcacgatggccgacggctcacccgtttgggtgagttggactgtgaagattaatgtgagactgcggactattgctggtattgttcatattgctgaaccggtcgagtgtttgatcattcccggtagctccggcgaatttctacttggtaacgacctgttgcttaagttggggatcgccgttgagcggcaaatcgacttactggcagtacctcttgcagtcgacgagagcgaagatgtatttgatgatgcagataaacctatcgttggagaaggggcgctgcatgaagaagacgttcgagctgctattcttgagctggtggacctggcaattgaggaggggtttccgcgtgagtttaagaaggagctcactcgcattgcgctgcgcttcgacctgtttcgagttcgcttgggtgcggatcctcctgctaaagtgccgtcaatgcgtatccgcctgaagcctggtgcaaaaccgtaccggtgtaaggcgaggaagtacccacctgaagttcgtcgcttcatggaggatttcaacaacaggttggtgaagttagggtgggtgtacgaaaaccgagagagcagatgggcgtgccccgctctacctgttcggaagggaggtggagaattccgccaaacggcagactacaaacctatgaatgagctggtggaagcgatcgtaggaatcatgcccgacttgcagacagacctggaagccgtcaaaggggccaatttctttggcttattcgatttcattaagggatattggcagatcgcgctcgcagaagagtgccaagagatgttgtcttacatgactcatcagaaggtgtacacgccaagacgggtcccccaaggatgtactgatgctgcgctgtttttccaagctacaatctagtagtgtttggaggagcttttgcggcgccatttacttgtgtggatagatgacttgctactgtttgcgaacgatgtgcagacatacctagtcaagttggaaagattgtttgaactactcgattatttcgtcttcaagctcagtgttaagaagtctcggctcttcaaaaaggaagcccgttggtgtgggaagatcatctcaggctccggtgtgcgtcatgacccagagcgcatccgtgccctccgagaccttccctacccaagcacggcgggcgaattacagcaattcttgtgcgcaaccaattggatgcgggagagtctaatagactacgcgaaaacgactcggcctttgcaggacgcattagatgcagttttggcgagtgcagcaaagcgaaccaaacgggttgcagctggaattgcaatcagtttgactgctgaacagcggaaggccgacgatgaattgaaactactacttgcaaatagtgtgacgctcgcatttcctcgcgagaacgcaactatgcgtgtgatgaccgacgccagcgacatcggatggagcctggtagtaacacaagtgctggattggaaggctggtgagcccgtacaccggcagcaacatcaactattgacctgcttgagcggcacattcaccggctcgcagtgtcattggagtataatcgagaaagaagcgtatcctatcgtctgcgcttgcgataagttgagctacctattgctacgaccgggtggatttaagttgttctgtgaccacagaaacttgatctacgtatttgcacctggagcagaagttaagaagcacattcgtgggaaattgctgaggtgggcaacgcaactagctgagtaccggtatgaaattgagcacatcgacggaacatcgaatgtgtggagcgccatggtctcccgttaggcaggtaaccacgctcagaagactcacctacggcagatgacactccgtaagcgtactcccgcggcagttaccggcacaacagcacctcgtaaacgagctcgacgaggacgcaagcgtgtatctcaagtacaaccaactaccgatactgtactacctacaccacaccccatccggcccttgaacgacccggatttcgagtggccaaaccgtgacgccacactccaatcgcaaaatcgacataagacgtgtcgaccagcagtggctactggcggtgaaaaggaagggttgtgcattaacggcaaactgtgggtacctgacgaagacgagggccttattcaacgcatcctagttgtcgcccattgtggaccgcaaggacaccgtggtcgggaggctactatggagtcgattaggagatttgtttacctggtccgcctgagagcgcgggtggaggaattcctgtcgacctgtcttttatgccatcgcgtgaaaggcagcaagattatccaaaggccatggggtgaaacatacagaaccaacgagcgaaatggagcactccactgggattttctgtcgcttggagagagtttcgccggtgacaactacctactcgtacttaaggatgaagcaacgcatttttgcgaattaacaccttgctcaactcctacaagtactgtgactgcggaagccatcctcgcatggcatagcagatatggcataccgccactgtggatcagcgaccaggggtcgcacttcaaaaatgcagttgtggcagaagtgtgccggcgactgaagtcacgtcaagaattcacgttggcttacagtccgtggatcaatggcagcatcgaacgtgccaaccgtgatattatacaggcgctgcgagcactccgtctggaatatgaagtcgacacacatgattggacatatttcgtgcctattttacaggggaatctgaatcacaccccggtcccttctctgggtaacagagccccagtggagcttttttgtgggttgccgctgccgtcacctttggccttttgtgtggactcgaggcagcgcaagattctatccctaccagagcaaccagccgacatcgagccttggctggtggcactgaaagctagcgttcgatcgatgcacaagcctatgatcaacgcacgcactcagcagaccgagcacaatcaaaggtgacaccagcacgcgaagaagcccaacttcgacgtgggtgattacgttttaaggtcgagggtggacagtaaataccaagacaagctactagtggcatggattgggccctatcaaatcacacgagcagactcgcactcgttcacggtgcggcatctcgtcaccggggaggagacagacgtccacagctcccggttgaagttctatgctgacagctcgttgcagatctcagaagagatccgtgagcatgtagcggcccaaggccaaatcctggcgatcaatgaactactggactacacatggaacagcgctaagaaggactacgacgtgctagtgagctggaagggcctagagcctattgaggacttcaacgagacgaccaagtccctagctaaggatgtacccgcgttgctacgacagttcgcagaacgatgtgttgatactcgtttcgaacgccacgtccttgcactgaccaagcagcgctccgaggcataacagccgatgctcaccgacccatcgacatgttccatgtacctcgtccgcggtacgacgccagcaaaaccttaagtctcagttttcggcacaacgagaattttcgacaactttttcgacatacattatggacatgtatttttgacaattgacactttgacactcaaacagattgagttgggctcaacagaacgagcaagacaacttgacctgattgactgggcaaggcttggaagggtggtgtagtggcgggtttcatccagcccactcatcgggtgacgtctacagaacgacgccaccaagctggcattaggataggggagaacagctgttgaatgaagaggcgagccgagcgcgccccgctcgcagagtggcagcaggcttcgcctgtctgccagtcgagttattttgcaaccgaaagcaaaccctctcaaacatgttattattgttttagcaagtacgagagaagttcagatcgccagctgtggtctggatagtgccaaccatacatagtgcgatgacaacacgaggccgaggagtgaggagtcgaggacgcagttcgaagatgagctcacttcctcttttgtctccaggtaccgagcacggatctagagtagtaggcataggaatagaggataaccaaaagagtaatacattgtagtgagctacctactctgtgtaaactgttcatttcaacatttcaagtacaatgagcaagccccaggttgacaagtcgtcggtcgactcgctgaagttcaacgggaagtccctgcatggaagagcaagttgattatccacctcagggcgcagagtgagcaacgcgcgctcgaggagctgcagcacaagcgtgcaaagccgctgacgcgcttcgaggatctgctcgagagccagccagagctgccgccacgcccgcccgcggcggacaaagaggcgacatggcagcacgatttgcacgagacgctactgaatcaacagtcgtcgtacatcaagcggctgctgtgtgaaacgctgccgggcggtttcaagggaatcgcgaccaagcaaatggacgagccggtccatgtgatttggcggcttgttgagaaacagtacagcctcagcaacgcggcaggcgtcgtcgggctggtacagcagttcctggagatggtgaacgccgacttcaagagcgttggccagctcttacaagacctcaacaacgtgcgcagccaggtcaacgtgaacgcgcacgaggctctgcacacgcacatgatcacggcgaagatgatactggtcatggtgctcagtgtgcttccgaggcacatgtggggctcctccgtcaagttcacggaggagagcttcacgctggagaaggtgagcgagaagcttgccaacatctttggcaacaagaccaagagcgaattcatggcgctggctagcggcagggtggtcaaccacgtcaagtcgaccccagccaagacggcttcaacaaatccgaagggatccgttctgggcaagcgaaagaccgcagacggtccgatcaacgacgcccactacaacgtcgggtacatgaagtgccactactgcgcaggcgcgcacaacgatcgggatggcattggcccacacaagatgcttgactgccccgcgcgtcgcgcagacaaggctgcgggtgtgtttcgccgcaacgtgtggacgtacccaagccgcaaggctcgcaaggaagtacacgagcctacacccaagatgaagggcaatggaaaggccaaagccaaggagcgtcgtgaaatcccattggctgagtgcctggtcaaagtcgtggcagtagacgcgtacgacgcgcagcaagattcgctgcccgcgaccccagatgggtacacgagcccgcccccaagcaactttcagcagcctgacacgccgggaaagggcgcttcgccgatgagcgacgaagacgagccaatggagagcgtcgtcaacgcagcttgagcgtgagggaaagttcacgattcgtcggatccggtccgctggaggaactgagtttgtgaatgcagcctttaaaagcttctgtaaaggcaaaggcatcgtattccagacatccaacgcctacagctccgaagaaaacggagctgcagagcgagaccaccagagcaaactggatagagttcgttgcgcgttgaaggacgcagctatggaacacaggtggtggccagaggcgctcatgtacatgacttatgtgcagaatcgcacacccatggcacgtttgggaaacaagacaccgtatgagatggtgtatggggagcctcccaacgtgagtaagttattgtgtggggatgtgggtgttttgggcacgttcctgccaccgtaagaaaggacaaaaagctgtctgctcgcgccgtaaagtgccggtttctcggaatatctgaggaaacgaagggttatagaatctgggacatgtataacaacaagcacatcttatcgcgtgatgtgctgtttgatacgaccaatgtagccaccatggttcagcgagctttcggtcaggccgaagagcccctcacaattgaatctgccgcgcgcgagccacccgcagcagagggaaaccaaacactagccaccgagtctacggaggcagtgggagctgaagcacttgccgacgggtccacggcagtagtgggagctgaatcacgagcacaggggtctactgaggcagtgggggctgaagcagctactgaaaacagtaacccagcagtgggagctcaaaagaaacgccaacgtgtggaactcgtcgatacgccacagaggcgtgaaccccgcccacgtagagaggcgaagaagccgaagagatacgcggactatcagggcttccaggcgatgatagataagaacattgcgcagaccatactagagcacaaagtgccgacaccacggcgctcaatgcaaccttaagtggacctcatagagagcaatggaaacaagctctggaacttgagtacgactccttgatcgagtatgggacgtggagactcgtaaaactgccacccggacgtaaggctttgccctgtaactgggtactagtagtaaagtataacgccgacgggactgtcgagcggttcaaaccacgcctcgtagcacagggcaaccaccaggagtttggggtagactgtgatgaggtatacgcacccgtggcacgatttgagtcgctgcgcctagtgctggcgatagggacgatattggactgtcatatccaccagatggatgtccatacggcgttcttgaacggcacgatggaaggagagcaaaagatctacatgaggcaacctcacggttttgcgaagcgaggccaagagcacttggtctgtgaacttctgaagagcatctatggcctgaaacaagccccgcgcatctggtataaagtcctacatacctttttgacgtcgatgggttttgcacgctgccacaaagagttttgcatctacgtgcaaaaagtgggagtagattggatcatagtcgtggtctatgtcgatgatctgacgatcatgtcgcggaacatgcgactaattgatgggctcaaagccgagttgtcaaaacggttcaagatgaaagaccttggcggcattcactacatcctcaagatggaggtaactcgcaataggaaccagcgtgtgacgatgatctcacagcgcaaatacattgcagagctgatcacgaagtacaaactggtcgatagctcgccggtgatgacaccgcaagcacctggcctcgtactcgagccagagacgaacatgagcgcagagcagattgctgcgcagccttacgactacagaggcattgttggatcactccaatatttggtctgtggcacacgaccagacatcgccaacacggttagagaattgagcaaatttctgtcttgttacaaccgcacgcactgggaagcggctaggcgagtactcaaatacttgaaagggacgtcaaggtacggtctgtttctcgatggaaaaacgagagacgtgacttacgaagtgtacactgacgcgagcttcgcgtgtcaacctaaagaacgtaaatccgtaacagggtacgtaatccaaatggccggagccagtgtgtcatggtgtagtagcaagcagggagcgtgtcgctctctactgctgaagctgaactcatcgcactaagtgagggagctaaagaaagtgagtggttgtggcacttgctgggagaaatggagtttcctcaaaaggtaccagtgcaggtatggtgtgacagcaacgctgccatcagcattgtgaaaaatcctggaaatcacaaagcaaacaaacacatcgagatccgctacctgtttacgagggacctggttgaacttggccgcctcaagatagcttactgctctacaacagagatgactgcggatattctcactaaagctctccccacaaaacaattcctgaaactaagagagaaactaggagtgcgaggtctgaaactttaccctagtacttagtgggagtgttgaatgaagaggcgcgccgagccccccgctcgcagagtggcagcaggcttcgcctgtctgccagtcgagttattttgcaaccgaaagcaaaccctctcaaacatgttattattgttttagcaagtacgagagaagttcagatcgccagctgtggtctggatagtgccaaccatacatagtgcgatgacaacacgaggccgaggagtgaggagtcgaggacgcagttcgaagacgagctcgcttcctcttttgcctccaggtaccgagcacggatctagagtagtaggcataggaatagaggataaccaaaagagtaatacattgtagtgagctacctactctgtgtaaactgttcatttcaacaacagcgaaaccaatgcgaccgacagagaggtcggtttggtagaagacgctggcagaaggcgctagcaggagtcgccggcatgaagccgccgacagctaggagcagagacacagacagagatcactttgagatttacatctaaaccatcaacagagctttggtttgcccggaagcgccagcatccctcgtagtgttccgaaacctactacagttacaactgtaatgtggttctggggacaaaagccacgttcttccgctctctgggaggcaacaaatactcattgggagccagctcggcgtagcggtagactgcaaatgcaacgatgtgcctcagcagtgacaacagggaggcttaataggttgtggagtctaggtgttgttgggtctacaaatgatttccgtgacacatcccagacaatagcagtacaagttctcaaagtccattttcacgttgcacgttatcatcgtgagcctctgccatgagtctaatctatcgtgtgccagtggcccacctccagagagcattcagtatcaagctgttctcgtttggcacatgctcaacggcggcaggtcggggaggaggttcgtccatgcgtgcaatggttttgggcttcgttaccgtaccgtcctttagataatttttgtacgccgtagcaatcccccaatgtctctcgttcacgggatcgaaggctttaaccttgcccatgatgtcggccactgtcacttttttggctgcccactttgcgaacttcgtcgcttgtatttcgcccgtgtttgtcaagatatcttcgagcttctgccaagtcagcccgccgccatgcttcattcccgtcaagacccggtcttcgtcgtcgtcttcgtcgtcgtcttcgtcgtcgtcttcgtcgtcgtcttcgtcgtccttctgggctcggagattccgtgcgtgtcggttgacgttgttcttgcccgagagaaccgaatccggagaccccatcgtcgagatcgccgcctcgcttgccgtcgactgcgcgcagccgctggccaagatggcagcacacaggagcagcacggaggatgcccgcattccgattcgctggagcgtcggagaacttgggagggtcggagagaattgcggaatgcgctactgtacagaccccacacaagttgtgggccacaacttgtggcccacaaccaatctacgtcgtctaacattcggaacggaactggtgatctcaagatggggattatgctgaatggtagtgctacactacactatggtacactttcgggtcactttcgggtacacaattcccaggcaaatctatcgacgatcttccttcccagttgtccgctcgtgaaagttcaagcaatacagaccgatactcactcagaagtccgtctccgtacaagaactcgctgtcgtaatggttcagcttggtcttgtagaagcgagatctccacgtatcgccgaactgggactctgggatcccagccgcgcagctctggaacccctccgcctggtacttcgacacgagccctgaatacccttcactgcacatgagagcatacacactcgacttgtacgctttttgagccgcagtgtacgccgcattgtgctctgtggagctgaatctctcaccttggtaggccaaagacactaatgcagttgtaggagggcactttccagtgatatcggccacactttccagtacatcgttggtctcgccagcacaagacgcttggacgaagtcagaccccatactccccttcatagggccagccaaacccacccacgtcgagcttgaatccaagctacatttccccgacgcgatcgtcccggccagcatgaggttccccattgaatgggtcactagaattgtgtcggtgatggtcgaatttacgctcgtgtcgctcactgccaacgctcgatcgcagactttttgctgctgagtgtcgtcggtccaggaattgttcaccgtgtccagcacagtgtactttatggacgagcagcagggcgcgtggtcggttaaattcccccagtagtaggagaacgagtcgacgtttgtagcttcctcgtgatcgatgcccatgccatgaatgaagagacacggacgcggagtggacttgcacgtacaaccgtggcgctcactctcacgggaggaatcgctagatgaagaatgttgcgattcatcgtcagaatcgtcggaccaaaacgtaaagtcaaattcagatctcaattccctctcggcatcagctgatgcaagttttccagtgagcagggacctcccgatcgacgtcactgagatcggtgacgctgtcaatctgcaggtgttggtccttgcatcaggtgcgggaatattcaccgggctctccatgtacctcactgcgatatgcatgtcgtctccgtacattttgagacccgaaccagacgcacagagcgaaaaatcgataccgtttatcaaaagttcgaagaggtggtctgttgagcatcggattttgctgttgccgctgcctgacgtagctgttgctgcgttaattgcgctcgcaattgtgttgatcggtgggagattccccgactccggttccaagcacttcacgatggaattgtcggtgttgttgtccacggaactcttcgagatgaggccaattccatgcacgagagtgtaattgtacaatgtcgagccttccgcagacgccacgaaggtattgtagatgacgctggcgccatcgctcgagacgagtgggttagcgaacattgagaagcttgactgtccgaaaatctgcatcgagctgcgcttgagaatgaagtcgaagcgaagcggtggccaattcacgtctccgtcctgatggagttcgcgagaacggtgctcgaagtctcgctgtccgtctgctggcttgaaaactagcgcgagcagtgacgcgaacgttaccgtaacgcgaagtagccgcaagaacatctcactggcgggcgtttgtagtgtcaactcggaaaataacgaagtgagctataccgcttcttgcctacaggcacttgctcgaacgacgcagctactgtccacttcacaatcttgaaaagtatagcggcgtaatgatcgctcaggcaccgacgattctacgtgtcataccctcggtatcgactcaccaatggttaatcgcgatcaacgctgcacacgcacccccggagccggctttagtaggatccttgctacttgacgcgtgcgcgtcaaccgagcgaggcataaacagctacagcaggcttatgatctgatgaggtggtcactggatgaaaaatatcaaatgacgtcgaataaggccttacatgcatctttgttaaagcttttacaaccatttttactttttatgctttttgcgggttgtcaggggacctgcactctcgtttgactacagtaaatattcgaaccatttgaccggcatcttggcctcgtccagcatgccatctcccgccaagaactgcatatcataatggttcaacctcgtcacgtagaatctgttgcgatagttggtgctgaactttgactctggaattccaggcgcgcagctctggaactccaccatgccgtcatttttcttggatttgtgggggatcgtgtggcccaaaacccaaaatttggcctggtacttggacgtcaggcccgaatacgctcgtccgcacataagagcgtaagttttctcgcgataaaccttctgagcggttgcataggctgctttggagctgtggctgccgtgctggtacgccagcgacttcaaccccgtgttcggggggcagcgaccagtaatatccccgacctcttcccaaagtttgttcgtctcgccagcacaagactcttggacaaagtccgaggccatacttctgatcatcggtccagccattccaacccacgtcgagcttgagtgcaagctgcatttcccagtcgccagcgctccggcgaacatgaggttccccatggagtgcgtgacgacgatcgtgtccttaatcgcagccttcgtgcttgagttgctcactgcgagcgcgcgttcacagactttacgctgctgagtgttgctagtccaggtgttgtttaccgtgttcaattgggcaaatttcactgaagagcagcacggcgtgtggcccttgatggactcgccccagtacgagaaccagtcttggttctccgccacctcctgcttcacacccagaccgtggatgaaaatgcacggccgcggctttgacttgcaagtgcacgtgggctcgtccctaaacgagaactcaaaggcggctttcagacttctttcgtgctttggaacagactgaccggttagaagagacttgccgattgaagtgatagagctcgcagacgccactttcatgcattctccacctttggcagtagtagtcggcgtctggatatcgatcgcgctctccaagaactccactgtgatatccatgtcggtgccttgcatggtaaaacctgtagaccccgaagcgcataaggcgaagtcgatgccgttcactgtgaccttgaacaagctgccgcttgagcagttgatagacttgtcactagtccctgacactgctgttgcaccgttaatggccgacacaatcgcgttgatcgcaggaagtttcaccgcttccgagtctaggcaggttactgtcggtgttgctttgctgtcgtccgcagggttgccggagtacggagtgcttgaggagtgggcgacgctctcaataagcgtgtagttgtatagagtcgttccttcagtgaacgttgcgtagacgtcgtacagcaccttgtctttcttgcccgacacgatggggttggcgaacatgtcgaactccgactggccgaaggctttcatggagctgcgcttgagcgtgaagtggaaccgcagggacggccattgtgtcgtctccgtagcgatagaagaccctattgcggaggcaagcaatgcaatcaccaagagagcgggtggcatcctggagagggagaagtatcgggcttgaggaattccgcgactgttgcttcaggaagaggaatgtaaaatgatcgtggcctctgacagcgcaaagccctgaggcagggcgccctgagctgtcggcacagcacactggcatgccctatcagcaggatctatcccagcatcgggaaacatggaggagaggtagcatgttggaaacgccaaggagagaactcgacgttccggagtgaacttttgccgtccgatcgcccacataaggatcgtactgtacgagctttgccatggcacgttctgcactccgagtgatcaaaaggcaagcatcaggtgaatccgtgagtcgggcgcagggtttacttccttccttcgtgcacttcacttcaactttgacccatttcagttttggcacgtgttgctgctccagactgggaaacacgtgacgagcctggagctccagactgggctcctctacggccggcttgaatgagccccgctagcttgtgggctacggctcgaatgtgcaaacgatcgcagttttccaaaatgtactggtgaatggttttcttctttgcacccgctttctgtacaatagaaaccgtgtgcacaacctcatccggaatagaaagccttgtccgtgggtggtgcttgaacaagctttcactgacggggtgattgtgctctaagcttactacaatcttcgtaacgcacaccacccaccgtgatggatctgtaccaacccgacggacgcatgcatttatctacgaggggcatgccataaacaatctgtgtaagcacattttcgcttctgattgtaaggtcttctgccagtttcgtgccgtccttcgaacttgcggacttgctgtggcataacttttcattgaattgtccattctgaaatctgattgcaaccgctaaatctgcgcgattgggctgaattcatgtacttcacgctggtccgtgtaaattttgcagaacttcttgttattgttttgaaaagcttgttgatttggagtgagctgccagtttcctgcctctttttgatagcatttttgtatgctatgcaaatcctaggaggctcatcaccggaaatggcatgtgacgctggaaaaatctaccaatagactacgagagtttaacaaggagaagatgctaattggctaaaaccagtaggcacggaactggttgtaggcacgcaactggcaccttaccttacggcattgtaagacattcaaagtaattagcacaagtacctgagccggacactctatctggcaactttgctgtcgaagacgtttgcctgtttccctcaacttgtacttccctgcatggatacattcgagacgtcttgcgtagtgttcgaacgattccgggactttatccgctgggtcatgcaccttactgttacgagccttcacggtttttgaagtcctgaagcggaaacgctgcatgcacgaccctgggttagcatcagcttagttcaaatacaaagtaaacaaagcatacctggaacgtcctcgactgataggcattcacatgcgagaagaatcccgaccacgtgctaaattctgtagcaccgaaatctgcggggaagaagctcgtagtaccacctccgaaggcgtgtgccaccccaccagctactggtacgcctccgtgtgtgtggttggtgatttgctgttgctcatttcgagctgattgcgacaaagcttgccccaaactgccgtcgatgtcacactcttgaggagtgtgagccgatcgagcaacatcagctgcccgaacgcaggcatcgtcgctgtcgtcgtcagcactggtgctggagcaatcttcatcaggtgcagggcgctttcttcttgccgctgcctcatctcgatcgtcgacgtcgaggaacgtgccttcactccctgctgtttcgcactattattatcgacgatcggcctctataccttgtacttaccgtataccgtatagatgcagcacctttttctaataaaatgtgtgactgctggccgatgctgaagttcatcagcgatttgtgaatggaagtgaactttttttcaaatcatttgcatacaaaactcaagttagtggtcctttttttcgtataagcaatgcttattaagcataggaagtacccgttcatatgcagtacagaaacttgtcaagtgctgcatttatccgggtgctgcatctatacgacttttgtggtacgctataccactccgtttcaaaatgaaagcacgattggcgtcaaaatgcgccctccaaatcaattttcaacgttttcgcgtaaaaattgcaccacttgaactgcggaattctcctcttttaattgatgtgctagtttacctgaaccgtttagaattgacctttgtacacttgaatatcgtgtggctagtaggcttttctcttcggaaatgcacaagaaagtacaagtcatccgtgatttgaagatgtcagtaatccctcccatactgaaaccaagtcttttttcgtgctatctttctgaaacaacattcacggtgaatcatgctttctttttgaaacggagtggtacgttggctggaaggaagagtgcatgctagggttagcttcgaacatgtgtgtgggtgttcaaagtctggagcagcaacaactcttttcagttttcagtttttttccagttttttcctcttgtcgcatttttcagtgttcacttcgtgctttttagtgaaattcgtgcacacgtcacagtgctcgatgtcgaggtgacgtaacgaactgtgcggtgagcaaatctaggggaatgcgggctcaacctatggcgtcggcggtctcgcagccccgtcatcagccatcagctcatttctcgcggcgcacaatgtccgcatactggtcggtgccatcactgatgccatcactttagaagcagccatcaggtacacctgccgtgcagcatgccaccactacgctgggggctggtgctcttcttcactgtcttcttcctcgcaggggtggctacaaccgaggccacccctgtgctcgatggggccacagactggccgtcactacgattcaacctcaccctcaagcgcaattcgatgcgcatctacggccagtccaaagtatccatgatcgcttctccggttgtgtccgaaaatggctccagggtcttctacaacgccttcgcttcgttttccgacggctccaaagtctccaactacacgtacgcggatggggtcacgtatgtctcaaccagaggcaggagatagacaagcccaccgcagatcaagtgtgctggggcggagttcgacgaaatcctgccagtcaacacgattatagcctccatcaacgaagctacaaacgtatcaagtagcagcaactcagcggttcattgttcaagcggcagcacgttcaaagtctcgatcggtgactttgactttattttgtgtgcgttgggctcgtcggggttcaacattcaaggcaacgacatggacatccaagtggaatatctcgagaattttgtgagtctgactgctttgaaggacgatactggagacgattgtatcagcgctgaagtccaagctgttgacgtgacctcggtcgggaagttgttgctaactggggagccagtcgctgcggtgtcctcgcggatgctaaaagctgagattgatttttcatttatttacaagcccaagaagtgttcgtgtcgatcaaaaccacgcccttgtatcttcatgcacggtctgcgagttccagaggaaattgcaacgaatgaagacagtttttcacgatattgggggacgtatttaccggatcatgcaccgtgctgctcgtcgctgaagtttgcgcacctgaacacgatgaatttttcgtggactgaccaaactcgccaacagttagtgtgtgaccgcgtcctcgctgcgagtccccgcagctcggactccgtcgttgcggatactatcgtcgtcacgcactctatgggcggtctgatgctagctggagcgattgcgaatgggctctgcagcttggccgacaactcgacctgggtcagcatggcggcgcctatgggcgggagtatgggcgcggactacgtccaagcctcttgtgcggggaagtcgaactttattgtgaacaaagtcgttaaaatgcgcaacgaatgccccccaagacgtgctctcaagtcgctgtcctacgagagtggggaatacagctccaagaaactcaagagggcgtacgcagcagctcagaaggcgtatcggacgaacgtctcagccgtcatgtgcagcgagaactacgcaggattactgtccacccaccaggcgtacttctggctcctaggtcacacgatcccgcacaagtccaatgacaacgacggcatcgtggagttccagagctgtgctggggggatgccggaaggaaggtttggcgacaactacgtcgagcggttctacgtgacaagactcaaccactacgatatgaccttccgatcaggtgacgcactcttcagcaagtccaaaatgcctatgaggtggttcgagtgcttactgtagtacagttagataaaaacaacaagaaaaaaatactccggatgtgaggaaaacccaactcgaacaattctattaccgtaaagatgcgtactgtatgtatattcctacagaagacactcgaaccacttgacgggcatcttctgttcgtccatgacggagtctccaccgcggaactgcatgtcgtagtggttcaatttcgtcacgtagaagggatcacggtagttgtcgccaaattttgacgcagggagcccagcggcacaactctcgaacgacaccatgccgtcgttcgggcccttgtgggggaccagggatcccagagcccagaactgggcctgatacttggacgtcagtccctgggacgacttgctgcacatgagagcagataccttcgtccggtagacctgctgagcagcggcgtaggcggcgttcatctccggagtactgtagttcccgccttcgtacgcgagagacttgagcccgatgttagcggggcaacggcccgtaatgctgccgatcttctcccagaccatgttggtcttaccagcgcacgagtcctggacgaagtcggagcacttactgcccttcattggcccagccatccccacccacgtcgagctcgcatccagactgcactttccagttgcaagagccccagcgaacatcaagttgcccatggaatgcgtaaccacgatcgtgtccgtgatcgctgagttggtgctggtgttgctggctgtgagtgcgcggttgcagagcttttcctgaagctcggggctgttccacgtgctgttgacagtgttcaggtgggcgaatttcaacgacgtacagcatggagtatggccgttcacgtggtcgctccagtactgggtaaactggtcgtggttcgtcgggaattcgtcgctcactccaagtccgtggacgaagacgcagggccgaggcttcgacttgcacgagcacgaagacttcgatccgatagtgaagcttccctcctccttcagctgtctcgcgctatgaggcaccggttgtccagtaagcagcgccttcccaacaggggtaattggacttggcgatgcgacggacgtgcactgcaatctcttcttctcagccagtttagggacatatatatcgatatgactctccaaaaactccaccgagatgtccatatccgtgccctgcagcttaaacccagtcgaacccgacgcacacagcgcgaattcaacgcgatttaccgtaaccttgaacaaactgccactggagcagtcgaagttactgccactcgccttgttcacagcggtggcatcgccgatagcagccacgatggcgttgatggacggaagtttagccgtctccttatccagacacgcaaccgtaggtttcgccttgctgtcgtcctccggactacccgtgtacggggtactcgaagagtaggccactccgtggagtagagtgtagttgtacagcgtcgtatgctccgtgaacgtggcgaacgcgtcgtagagcacagtgttcgtcttcgctgatactatggggttgccgtagatgtcgaactgcgactggccgtggattttcatggtatcgcgcttgagcgtgaagtggaagcgtagcgacggccagtccgcggtcttttgaacggcattggcttgaactgtagcgaccagtagcaaggcaaacgccagcgctgagttcaggagagaccccgccatcgttccgaccgaattccgttagtggtgggtggacaatgaatacgaaactgaacgaggacaaggagtttcttatgtgttattttgttgaggctggttgcatacaaccatgcaaacgcacatccaaagggagaaccatggggaaagatggagaagtgctggtgcggcgaaagcagatcgacaaaggcactaatgacatagtaatcgtacattttgccgtttgattgtggataattgtggtacggaagccagatttttgcatgccatatgtggcaatgtgacagcaaggaccatctgcgcacgccgatgtgcacggttccattctggcttgtgagtaatccaagagtattttcaggcatcgtaaaactaggaaggatgaacataaattgggcgcacttcctaaattaaggctctgccagcgtcctgtattacagacaacgacggataaatacggcaacgcaaaacccggcacacatatgttgtactttttacaacaagtaattcagatagccaatcagcttcgagagttacacttgacatttgtattccatatggttttaagtactttctctaaatttgtgtgtactttatgctccgttacgtgtattttatgtcattgccttctatcgttcccgacagagaattctggcacatttactatggaggatgtcattcagttatgccggatttatccgtcgttgtctgtaacaggatggctgcataccaattgttgtgatctagactattggtgcttccgttatgaactacttatacctggccatgaaccaattgctcttggttttagacagctttgttgtgactttcgcacgatcctaggttcagagatgtctttcacgcatacgcacgtgtctaccaaacgtagtgtagggagctgtcttcactatggtgaaacccggtgggattctatccatgactcctgcgagtttttttgacactcaagcgcaactattataatgggttgcgctgcaaaaagaaaagggtagctcgctttcgatcagtttgaggtggatagtttgtctgtgctcacggatctcgcgcagccagccaagttatgatttgagtaactgcagtacaaacatgtcactgcatccgagcagtactgtactcggcccgcaataagctagtgacaacgctccagaaccgccctgatgcttaagtgaggtgaagactgagtgtaaggcgtcattgttttcgagtgaactttaatttaagagatgcgagacagtttggcttggttctcgtagttcgtgatgctgaacaaggatctattgggcattacgttgtccgcccaggacacagtatacgccatggcgactcgtaaggaatctgctcttatcactcatggcgcgtttgccgagtcatttaacaggcatgaagaccgatttaccaggcagtacggcgattcggtggtagggaaaatttgggcccagcatcgtagcttgaaggaagagtatcaagtcgatcgaaggtttggaaacagcctatctaagctcaaaacaaccgagacatggggagatctcggtcctgaaacgcatgaagagtgagcattggggtcaactcaccgatttctcgccagaagacgagctacatgcttcgcagtacttggagcctccaagtactgcgaaacatgctccaagttggagctagtgaaagtagcgcacagcgcagtcgttgattaggcttcatccgcttcattaagtatcgagcagagatacatcctatattaagggtccccagccttccttcattaaggtaatataggcactaggacggatatcctagtttgacgaagcctgagtattttgtacaaggtcatccaaaatttgtatagtagaatgaccgagcccaaaaccagtttggcctttcaccacaccaaagaaacgtccactgcatacagtgcagtggacatttagacgacggatgtacctatgtggcacttgtacatgtacggatcggttgtatggtcgccacaaatgcggagcaccgcatacggtttactacagtatcagggtacatgtattgtgcctatctggcaaaacgcactccgatttgaggtcctacgtaggacttttgctcctacgtaagacctcataaaagttagtaccagggccagtaaaaccatgcttaaacaaaaacttaatgtaaactgagcgaatggcttgcaaaggtaggccgacaagtgagcacgttcagtaccgctatacctgtagcgcacgtacgtagctccacgctgagcacggtgacctggttgcggtgctgcctgagcctccgcctgtacgagtgcggccaaactatgcatttgccacagatgctttcaggcgcactggcctgatctagtcctacgaaggacttgttagttctacgaaggcccaaatggccagcttaacatggccattcggtccttatttccaaaaaggtaccctttagatgaagacggaactcctacgtaggacttccgtaatccgatgcaaggccaacagcaaatcctaggtctagccctaccctctccttcttaagaccacctttttgaggtcagattggccaaagttttggaaaggcacaataccagcagttcgctatagccaacagaggaattaccttatccgagtacatgcagtagtgatcatgtgctcagtggtcaaagcttcgcaaaagaagcggcgtttgctggtcttaccggtagttagtccactctccgttgcatgtacatgtactgtgtacatttactaagctttacaacattcgaagcgcaacccatcatgcaatatgcagataatgggttagcacgcacgagatattgacaagcactacccagcagtaaagtatgcttcagcggatgcgtatcataagcacttcgttaaatcgtgaaaccctggaaaaataaagagtaatagcaacgtagttttagtgataaccttggattggagtacaaatcgagcaaacaatccctgaaccgagttaacaacaatttgtagcttttagtcgtagttgctgagagttaaaccacgaccacatgtaataattcgtagctttaagaagtaaattaatgaatacccgcttttggaaataaaagtacccggtttcagtaagttacagtaaagctccgtccaagcattggcaacccggagcgttgctccgggagggtacacaggtcggcgaatagtttcatggacgatgataacggataacaattgagtaaatcccagtgttgtttttaatccttttaaggattttagaagaacattaccagccgaactctctagttgattctaacgtgggcataacaccctggtcagcgtccaatggctgcgttgacgccagcaacgaataaaaaatctccctttccgtgtgcattcgctacagtaaaccaaagctcgactgccatcctgaccaatgataacaatatttgctgacacgttgtagtctacgacgccagtatttacatttgtgtatgatagctagtgtacaattctgcatattgagaagtccagataaccaacaacacggttaatcgttaacccccccccccccaaatatttgctgacagcaaactgacgcgatgaggggatgtttcattcgggggcaggttaagtggggcaaatctctcggtcaatcagagtcgtttatttctgtccaatctgccttgaccaaaaagctcagggcagctggggcaacttggacagatttatacctgttgaagccgatcaatggcaccactggattgcatcatcaatcggcgaggtgaatggcccccgagctgcatggcatggagaccgcgcgccgcgtcatccatgggttgctgtcgctccaggtggtgacaccgttggaagcagtagatacagtactaggatatgtagcaggggtaacatgcgcatgagcacgagccagcacccagttctctcattaacaacaccagcactagtcacggtgcaccgctcgccagagaccgcagcgatctgctatcgctgctagcaaagcatgaagtgcccacacactcgtgacatagcgactggtcctggtggggatggcgcggggggggggcggcgcggagctgctcgcggtgaggagcggagccccatggcgcaggaagctctgcctgacggttgtgctggtgttgtgtgtctttggggactgcgggtccgtgctccgcaaacttattaccgtggaaaaattatggtgtaaagcaaatatttggttatacagtacaaagctgccctatctaacctgaccccgaatgaaacatcggaaaatgtacagcccatgttttcggattggagggggtgaaatggcccgcaaatctatcgtgatgcagagaccaaatcggcatcagtggcgtttgagaagcatgaacaacccgcaaacgtagccccgaagcaaggcttaggtctacagttccctgcctagcgctgggtcggccttcaaaaggttttaaggacaggtagagccacatttagcagcagttcccagggatttgcaatagatttgggtgccatgacacccgtcctgaaaaccgaaacacggatgtccatgatttcagcatgttttacatgtttggagaccttacttggttttagtatgcctttatccctaaccctattccaaaacatgggctgtagggccagccaagcgagacagcgtgattagaagtagttgcgatgtactgtacaaacaacccccagcacgtctccccacgtagagcgaatgaagggcccaaagcgagctaatatctttggccgaactgcggttcgcactctgcaatttcctctccagttctcaagcaactgccgacccgcttaccatgcattactcctgcgtcctactgctggctgctgtggccgccctcctcgcacccaacaacgtcgttgctgagaaacccttcgcctcgacggtcatcactagtcaccgttggtcacaatgaaggcaacgacagacatctcctgcgtagcagtgcatcgaaaataatcagggaatgcggagggaacaggtgccatcaatatctttcggatagggaccatacacctatggtcatttccctaagcaacttatactaatgcctgaccgtcttcaaaaagtgttagttggcgcttgcgcttgcgcgactgctcctggcggcgaagcacttgagcgacggagacttcgttccagagagaacggttgaagcgcagaaaaaggataagctccaacgtgtccggcagcatcgacatccgctggtcactgtacaccatccccgcctgcgagaagtctctcgacgtcatcggacgtcggtgggatccacgccaagtccccatactggggctcggcacttacacatcgttcgtgaagcacagcgtcagcgaacccgagggcacctccggcttcgtcttcacccacgtctgtctccgttcgggcaaagcgcgccagcgccctcatctccgccttggtaagctctttggagcggccatcttgcacttctacaattccgttttcaaagtcaggaactgcaacggccttggcgcctattgcgaggtgcttggtgcatgagccggcactctcgaactcgtccagcagtttgtcgaaaagcactagaagcttgagtgcggattgagttgcaaagcttgtcgctgacctggtcgaacagggcgtcgaccagatcccggttcgcgacggcgaagctcattttgggcgagggcttagacaggaggcttgatcagcagagtgcgaaacgggaaatggtagtgtaggcgcgatgaacgagccgcagccagcatgctagtcgtagcttagcattcaaggtctcagcgggtcattatacttagtttttgtatagcattagggtaggtcccttgagacacgattccctccattatggttatgggtaatggatattgatggaccatcaccattcacattttcgatgcactgctgcgtagccgtgaaactatcgcggaggaagaagaacgacttagcaacgacaaaatcctcaaactgctgggggacgcggacgactacggctcgatcttttcaaaatggaagcataccaagggatacaccccatcgacagtcgaaggaaaattagacaagtacaaacatggcttgagtaacaagcagttgctcgagattttgaacaagtaccggtcctactacggatagggggatgcttgggtctgagcaggctcagctcaacgcgatttccagccgttatcgcagcggcaatgaggcgggcacaacttacagcggtagccgaagcaaccgatatactcgatgctatacactaacacgagttatcgtggcagtacaaggcgtacttctcggccattaaaatcaatagaacatggagtctccatgtggtggaaatttatctccatcatggagataaatttccaccacgcatttcgttgtccactaaaatcagaaatttattttacgccatgacttaagaaaacaaaaagcagcatgacgattcattgtaataaataagctttattatagcttgtgcttacagaacctggagtagttaatagtcagttagttgcaagcatgcttcctgtattattcttcaacaaggggtttattgctagcatttaccactgctggacgaatcacttattataacttactggacttgtgtttcgtactagttgtgtacttaagtaagacctattaatgaatagtaatttgcgatacttaatcatgatgaatagggttttcgtgaagacttggatgcgagcttgcgttggcagctctggacagcctcttgtagaaaatgcatggactcacaatgctattatagacggtagtttctggaatttgggagttgaaaacagtagcgctgctcgagtctcttcgagactctcagctcgtactgggataggaagcgacgaagtgctgatatcacagcccaaacaggattcattcgggcgctgcccccccccccgtccagtcgaagccgatgatgaaccggtaacatatcttaggtcaagttatacatgtgtcgagtgaccgcgtgttctcgacttctcaagaatactggagcagttcaattcaacttcgttgagtcaagattcgctttattgattttgctcgaaaatcggttgtacatcgtgcacatagtggcggtacattgcggattgcgtaaataaaccggtaagttgaagcgcttgcgaaacagcatggtatgatattttggcgcaggtcttactaacacgactagcgaggtcgcatcaggggtcggccagcgagcacccacgagtttaagtcgaaggtccgctccggaacccaatataccgccgttagtggaacgctagaagacgtcgttcacgaagaagtatcctaagcggaataagtagtgcgaatgattcgagcggcggagtttatcaattgcggtgaaaccaatcctatcccagccttcgcgaagccttttttatttgcgtgaagaatcacaaccaaagtcagtaaccaccaaggagcgatatgtaatcgctaacgtgtataatacacgacgaatgtacctatgtggtatcgtacatgtacggatcgaatgtatgcttgcttcaaaatgtgtagaaccgcatactgtgctgtagcagtctgctaaccaacatgtaaagcacgtcatccgatccaggaaatggttgcctggctctttgaacaccccgtcacgacgcagtgtttttatttttcaggtcgaaacatatacaaatacagtaagactaatataagcgacttgttgaaaccaaaacttgttaacaggtatacggtgaccttgatcagcatccccaaacaccgcataaatcatcgctcttcatggtatcgccggctctcagtcgttcatgatttcaatcatcgtcatcgctttcgtcgctttcgtcgctttcgtcgctttcgtcgctttcattgccactgttcacctcgaatatgctggcctcgacgtacatgccacgatcctcttcatcttccaccatattaaagaattcgcgttggtgagcatgaccccaatcgagagtaaccctctcaattcggctgaattcgtctccatcgcgtccctggatatgcaccgccactcccaacgacggatgagctgctttcaccgcctccagcgcgccactcagttgttcggtcaaatacccgcctcaccagaaagagttgacttttgacctgtacggattccacacatgcactatggacttctggcggcagagtgaagcaccgagaaactcctcgctctcctgagagagcaagatcaaaagcgacagaatctccgaatagaaagatggcatcgaaaattccatgcgcacgtgtcccccaactttaaggtggataactcgctgcttgccaatgatatcctccacctttgacacgtatcgaatatactcgaagatatccttaccagtcaaccgagcatgagcgagttccaccgcagacagcctcttgagacccgccagagccaaaagtgtgcgacctgttaacgtctcgatggacaagactttgaagtttctgccagtggaagtgtcgttcatctcgatcgactccagccgcgggcagtactcggccacagtctcccaggacgtgcctccatacacatcggcgttcacgtatcgccctggaaagtctggattttcgttgcgatggaagtctatctggacgtacagtgttgtcaaagctggacatcccataagcgcgaagctgggggacgtggcaagtgcaccgtagcctagtcgcgtagaattttgatccaaaccaccaatatcccgcaaataatcttcgtaatcccacgtcgcgttcgccgagagcgataaactcttgaatttagacttcacgtgctctccaaagacgcggaagaacgggtcagcgaacggagcgagagcgaaattaaactgcctcaaagcagtacaggacgcattgaacgtctcccacgtcttcaaagaaataggccacacatactgcgcgttcgattcatagtcagtgtcatcacacgaatccaagtactcgactctcgggcggtacttcgctatcccctcaagaagctccgtgctgcgacgacaaagaccctcccctggatgaatcggaacggtcagctgcttcaatgccccgcaataccccttcgagtgccatctccccagagcttgaaccacttgcggcacaaagtcctccacatcgagactttcatccgttagattgatgaggtttctatcaagttcactcggttctggcaagaccaggaattccagaaagaggcaatgcgttgacgcagcctcgagtatttcaggaatacactggcacagtggcggcatgctacccagatccagtttcttcagcctcgtcatatttcccagaacgatattccaactgatagtcggagtttccaacttcctccgagcctggaaatgatagtttttcctcttgaattggacgcgaaaatctcgaattgaggcctcttgggtcgggaattgctccatcaattctaaatcggccgcgtttaagcagaatgtggcagatcgatagtcggctaccagacttcgaacggatgcgagcatgctcttggacgccagcaccacatttttcaactgtttcataggtaccggggttgtggggccagactctgggtgaagctcgggagagcgaactccaggatgtacgcgagtagagagggcgggaggcacggcaccgtcggcgtcatggtcttgcgcttggttgaagggatccaaactgaaaggtacagggcaaaaaaagacctcaaataatatctgggagttttagaactggtctggaacgtactgatactatcagtgcgatttggattggttttagaatttacagatctccccgtgcaatgatggctgtagcacgagcgctgtgccaccaacttggtgactacgaccatgccttgaaaagccgaggctgcgggccccaagcgaagatattctgtgacaccacattttgaaatgaggcaaggatttttaggaggtggcagctgagtcaggggtgccgtttcatcctttccagctgcaagggtttctgaccggaaggggatcaatttgctcaaagacaaacgagtgatcactgcaccatcgcggccaaactgatttcccaccgtaatcaagtttccttacccacgacacgagtacggatggatatcccggtgtaccagcaaaccaacctactctcgatgatatttgacgccctcgtggtttggatatcagtcatgtcgaaggcgacaacagatctcacattccaatttgcttcctggtacacacatcagcgcaagaaacaaaccgaccgacatgctgcggtgtttcctctctttgtcggcaatcttcagcgtctcactcgctctatccgggcaatcacaactcgacttcaatcgcggcctcgaagatgaaccggcgacgacttggccgtctctccgcttccaattcacgctcaagcgcagctcaatgagcgtctatggccaatccgacttcgacgtgcacgcgagccccgtcctctccgacaaccaagacaacatcctctacgacgtattcgcgacgttcacggaagagtcaactcaagttaactacacgctcgccgacggcatttcgtacttgacaactcgctcctcagatgaagacacagcgtcttcggaatgcttggacgcggagtccgataaactgccgccaatcaacaccatcgtcaacgctctgaacgaggccacgccagtatcaagtgcttatgggaggagtggcagtactgctgctcagtgctcaagcgacaacttcttcaaagtatcggtgaacggcatctcctttgaactgtgtgcattaggttcgtccgggtttacgatgaccgggacggacattgagatcgcggtggagtacctcgatccccgcgttgagattgcaaagcctgacaccactctggagtgcgagtcggtagcatctccaagctcactgaccgcactaggaaggtcactgcttaccggagattcgtcactccttgaagtggagaggaagctggaaaccgagttcgacatcacgttctgggacgacgatgacgattcatcggagcgctcgagctcgtctcacgatggctcctgtacttgcaagtcgaccaagcgtccgtgtctctttatccacggcatgggcgtcgaccgagaggaacctcacactgtcgactcgttctcctactattggggcaacctgaccgaccacgcgccgtgctgccagtcgatgaagtacacgatcctcaacacggtggacaacgcgtggacgaacgacacgctgcagcaacaagtgtgcgatcgcgctgtgtcggtcagtaaacggagctccaagactgtcatcgcggacaccattatcatcacgcattccatggggaacttgatggttggaggggccatcgcaacgggcaaatgcaagttggattcaagctccacgtgggtggggatggctgggcccatgcaaggcagtagagcctcggatttcgtccaagacacgtgcgctggcgagacaaactttgtgctggaggaagtggcgaatatcaccggtcggtgtcccccaactgtagcgttgaagtcgcttccgagtcagagagggaactacagctcggaggagctggatgcagcgtacactgccgctcagaaggcgtacacttcgaatgtatcggcgttgatgtgcagtgctgggtattctgggttgatgtccaagtaccaaccggggttctgggtgctgggcaaggcggttccgtacaagtcgggcgagaacgatggcatggtggagttcgacagctgcgccgcggggctccccgagtcgaaattcggagacacttggcgctcgccgttttacaagaccaagctgaatcactacgacagcgaattcctgtatggagacgcgctgttggatgagaagaagatgcctatcaagtggttcgagtgcttgctttaggtgcggcaagaaatattagcttgaaatttgaatacgtataagagtcatataatatgatcaatttcatttctaggttatcagttgcaagtgggcttatagcaaacactcgaaccacttcacaggcattttctctccattgaggatcgcatcgcctgatagaaactccatatcataatgattcagatgtgtcttgtagaaacgatctttccagctctcaccgaattcggacttcgggaacccggcggagcagctctcaaactcgaccatgccgtcattcttgcgcgacttgtgagggaccatggtgcctatcgcccagaactgggcctggtactttgacgcaataccggagtaccaactgctgcacatcaacgcgtggatatgagtccggtaaacctcctgcgctgctgtatacgctgccttcatctcctcattgacatgggtcccattatcgtacgccagagacttcagcgctgtactcgcagggcatcgtcccgtaacatttccaatcttctcccagacgatattagtttctccagcacaagactcttgaataaagtctgaagccatactccccttcataggcccagccaagcccacccacgtcgaactcgcgtccaacatgcacctcccgttcgcgatagccccagcgagcatcaagttgcccatcgagtgcgttatgacaattgtttcggttatgacgccgtctgagctggagtcgctcactgcaagcgctcggtcgcacacttttttctgttgtagtgcgctcatccaagtgttgttcaccgtattgaggtgcgcaaactgcatcgatgagcagcacggcgcgtggtcgaccaaatggtccccccagtactccgtaaaattgtcttggttatgaggcaactcttcctccacgcccataccatggatgaagatacacgggcggggcttcgagttgcattcgcatgaagaccccttaaaggagaagtcgaacgcggctttcaagctccgaccctcgttagaaattgactggccggtcagtatagactttccgaatgaagtcatagcggtcgaagacgccactttctcacatcgttcactcatatctgcactcggtacttggatagcgatatgattcgtcataaactccaccgtgacgtccatgtcgctgttagacagcgtgaatccggacgaacctgaagcgcacagtgctaaatcaataccgtggacggtgatcttgaacaattttccacttgggcagtcaatagagtcactggacacagctacagcgtcatttagagctgcgacgatcgagttaaccgccggtagtttacccgcttctgagtccaggcagtttacttcgctgtcacccgtcgaagagtacccaattccgtcgatgagggtgtacttgtgtgtcgttgatccgtcactaaacgttgccaagacgtcgtagagtacagtatcttggttatcggacacgacagggttggcgaacatgtcgaagctcgactggccgtacacggtcatggcgctgcgtttgagcatgaagtggaagcacaaacttggccagtttgaagcttcagaggcactgatgggtagcatcacaccaagtagaacggcgacaattgtcgggataacgggatttgaagccatttcgacggtcttgaacccgaagagtgctctgtttgccggagacggaagaatgccaaatgagctgggagatctgccgccgcttccggataggatagactgctattcgtacatccccaaccagggcacggcgcaaacacacaaagcaaatctctgctgtagctttcggaatacagctcggatctgcggcattgattaaagcaacattgaaatgttgcctctgcgcgacattgagagctcacattgtgatatatcgctaacattgattcctaacgttatatttgctttatgatttttcaactgtaattatccaacgcctctatcgagcacgaggcccccagatgcggccagccctgccgctggacaaggttcgacactacatcactccatagctcttgttcttgtggccctagtacacactcgtttgctgttctttgtgtgcgagtgcagcaatgagtccctcacgaagaacaggcacggatgaacgcagtgttaactgctgggacgtgtgcttcgtgaacgacagcgttgcggccgagggcagcaactacgcaccgcacacctgtaatgagaggcactgatggcaaagggcttcagcagctcgagccgtctgctgttctgctcagcagtgccggttgcgcagctatgtccgatgaagctgcccttacagccagcccaccgccccggagagcagtatcattgctggatcaaaatcgctgcgtgacgacactccgtacaggcttaagggctgagctattgtgcgtgtggagggtggatatgctgctgcgtcaagagctgggcctacgacctggcagccgccggtgtccgcgccagtgcacgtgtttgcgtcgatcaagctctcgagcgtaccgacgtgctgacgcttctacttactggcgtacggaagtgtcgtacctgtcccttgagttgtcttgagagtggatggtatggcgaagtgctgttcgtcgcgggggtgtaagcgagtgtggctccacggttccggtcaaaatggcaaagctgtgacgaggtgctgcgaaaggaagatgctgaagcgacaaatctttgaggcatccgcgacgctggattgcaagcctcgggaaagcacgaggcaggcagcgcgaaagcgagcgagcctggtctcggactctgccgttggtggcctttcaaggacgatgcagctcgatggcttgatgcggttctcctccccccggctctcggctcgcagctcgagttctgttcgtccacagctcgtttgacaagatctgtcgtagcgtggacttttggtgcgatgaaaccacgcacagagttcttaggcgcgttcttaagttcccgggagctgggaccgggacgaacgggacgatacccgtcgtccgtcaaagttgataattgtaagcattttttaagcccctaactctcgggaactaggtttcaagccaagcatgctgcaaaaatgatcgtacctatccatacgatggaagatgaagcctcagctaaaaatatattgttcttatttaaaaaatagactgtgtttctgcatcgcgctacttaaagattgctgtgttgcgtatgctggtacactttgtaactggaggcaaggtgcgagtgacttgtagtctacttgcaaagagtgacaacaactcgggcggtcactttcactcagagtgacttttttcacgcggacggcaacggacattttgccaaaatggccaagaaggtaagcaagcatgccgatgtcattccttcccacgctctcttcgttaataaatctatgttgatggtttcttagcccaaccagtgtgcctactcaagtggatgttgtggccgcctggccatcaagaagaatggcaagccacacacaatgtgcgagactcaccgccgctaccaagcaaagaaacagcgacagcgccgctgcgaaaaacatccaccgacactccgcgaaactcaatgccgataccctggctgcgaggaagtgagagctattaaaagtgggaagatgctgcaactgtgcgaaatgcatcgagcgcggcacaacgagggtcagcgactgcgctatggagcctccccccagacacgacccgctagggtgtttcctgctcagcaggctgctgatacggcgacggtgtacaggaggtgcgcgaggatgttttgcttctggttggagactccgaggcttccacgcgacctggcgccgcacgtatgccgcccgaggccgtgtccgagtcggaggctaccctcactgctggtaaatctccaccgtttgggatacgaacacttccacgcgagatgacatccaactcatttcgacctgatgagctatcgagatcgactttatcggatctctctcgcgcgctcacggatcgccagcaccaacgttctcaagctgacgcgcttttctttcagcaccacgctgaaatctggtccaagcagtacatcagcgcattgaataagcattcgaactagtctgcgacctgtggctttaggtcacttgcttaaagggatttggtcaatgtaggacaccgtcaacattgagcactgttaacgatcaatgacaatggccaatgttaacgaccctcaacattgatgttggttgatgcacaggttcgaggctaacgcttaattctcatgacgatgttccctgaaaacaataacttgttctgttagtagtttggatcctggttcacttcctacctaatggtacgctgagctccgctactccagtccaatacactaatctatgcagcatctctggaaacttaccaacttcgtcagattctttcttgcgcagccgcctccaaaaagatgtccacgtcggcgttgtgccgagaacgattgtcgggtggaggtacaatttcttcaatgtctggtgcacacaacaagtgccacaacattctcagccgcaagattttcttggtgtggctcgacaaagcgcctttgtgcgcagcgattccgtccattttgttgtgcagacagcaccacgcaatagccgttactagcactccacagttgatttcatctcctcgaatgggaccttccaagacttcgacttcccagtccggccacttcgtcgctgagccaaaggtttcaagacgccattcgtcgactttcggcaccagaatttccgtcactctggcctctgtttcgtccacaaatgtatccgtctgaagcggatcatacacgtacgccttcgaaatctccatattgatcactatgagagtccaatgaacattcgcaatgttgcatggcgccacgatgtattcccagttgcctttgcggatcttccagctggttgaagcggtgcagagggggcccacgaagagcgcccttccgtgctgctcgcacatcttctgcattgacagtgaacaactgtatcgttcagcctgaaattaccaggtagacgcctcagcacttcggtaattgggaatgttgctccggcgtttcttcctgagcccacggcaattgtcgttgacaacgaagtaaagttcactcttgtcaccacatcactcgcaacctcagccacggttttgccgttagcatcaaggctattacatgaatatgactgtaattcttgccagtctgaatccagccatttgacagacgccactttcactcgatgtagatccttgtaccggtgaaagtcctgcataacatggataagagatctacgcagcataattagaagcattcatagtataacagaatataccgcaaaacttacgggtgaaatttgacgcctcccttcagaagcacagcgaattcagctgtcgtcttcgtgattttccgtacggccgtcaccgcatcgacacttttcgtcaccatggtggattcaaacactacgggaagcgacctaatagcatttcccgctccgtccgtagttgccgtcgggcgaaagcgtgaatctgccttcgagttccaaacttgaggatagtttgcaaacagatctgcgactttagcatgatggcagctgtggctaagccactccgtaacagcttcgactgacagttctgcacgccacgcatctatctgctctgtccaattttccggctctggttcctctacgtgcacggcgagacgctgctgaacaagtggcttggtagaattgcgtcttcttaggttgtttttttggtcagactgcacggaacggggcaatgataatgccttcagaattaatttgccttttccgtcccccgaatcggttctgcttgactgcagtggcgatcctgcaattggcatttcatgtttcgacttgtttgtacggctcgggctgggtgacgcgtccttttcaatggcattcaagcctgcacttggtgctttgagcatcaaaatatcactgggttcggcggcttggtgtgctgttgtagggtgcggctcatgcataccgctcgcggctcgaattgaagcagcagaagcgaaacccaaatgtttttaccttgaaactttacgtacgatttggactgggctggaacatcatttttcccaatccgaaggattgactgggagtaaacttaggccagaaccatcattagcgccacttgtaatactggacggggaagctgcatcagcactccagcgagtgtttggactcgcctctgccaattcttcgacgtcatagtccacagttggaacactcccactttcatctcaagaatcggcaatgctgagcccttgcaacgcggagcgaaggtccgagcacgccaccgataccaaatcaattttccggtagaaatcgagcgacgacgacgtaacgagttcgtccaatagtggttggaaaatagccattgctatgttgaatttctccacatcacttctgacaacaacttgactagatgaaggttcactcttcttcaacttggtgtatttaatacgtgggcgtgcaggagaaatgctcaacttgcaacctgggacatctgaatgtggcgctgatgacccgactccaccgcgaatccaacacatttctcgtagcgtctcgttcagcgtgatagaagccttaagcactggaattagcgattctgaacgcttgtcaagccaacgttcagcaaccatagatgctggcaagcgttcgatacccaactcctccaacacgatgaacatcacgtgtgcacaaggcagtcgaaacgttgcaaagtattgacaattgcagtgactagcatccagtcgacaacgaaatcgcgttccacttcggttcagaacgacggcatgcgtctcgtcctgctcgatcactcccatgtgagcctttaactgcttgaacctgacaaattcatcataaactgtcttgaaaacgaaaatgctcgccgcgtcgccaatgtcctggatctcgcttggaaacatggggtcgtagtgaaggctgtagctgttttcaatcagctcacggcgtagattacgcattattgtgttctggtacagaaaaatccctgcaagacacttgtccagcgtcgtcgtcaggttgaggagcctcttcatctggcgccacgacgcctcaagcctgtttgtcgtcgtattccctgctgtaaagtacgagctgcgaacatgttttgccacatgcttgtgcagtttttcctgttgctttccaggtactcgtaaaatggcggtgatatatccatgcacaggtcccgcagagagttccattcgtcgtcaaacgcactttcggtgggagaatagataacggccagccagcatgcttctatgctctatcgctggttcggggagatatcatacttcttctcggcgagcttcttttgaacggccaacacagcatgaaattggcacagcagaacctgacaccagcaaaaccagtttagtgttaacgccatttgtgagtgtgatttaagtaaccttacgttatgggtatacttcctttagggcgccccattctgtaaaatccttgtcaatgacaaagctttctgttatattccttccaaccacttcttgaaagaactgcaaacatgccagcatggtctgtttccactggttatgtaccagcatctcgcacacggagacccctttaccattcgctgctgtcaccataagctcgcctaagtgcccaaattagattcttaaaacacatcggaatatatacagtacataccaagatgaaagcccaaattattggtatggtgcatccagtccaacaggagacactctccccatgcctgatccatctttttttgtgcagcgctgataaggacgactccgcacacaacgtcatcgtccgtccggagcaccatcgcatcgttcccaggggtgtccgtaaatttcgtcagcatctgaagcaatctcgcttccacggctggaccaccgtagcgagcctggcaaaggtttcgaacctgctggtttgaaacgtcgattcctgcacaaaagccatgcgtgtaagcatataccaagtatttaatttttacaacaagaatgtgtactaaccggtctcgcacgagatgtactctgctagattgcgaatggggacattgttttggtacaacaagtcgatattgacccccagttcttccgagcggatgattttcttcagctcaagtcgattgtaaatgtctcgtgtgatggcgtggcggtgggtcgatctctggggaaacagcggagtcagtagccaatcgatatcggagtaaattagcaatgtatgatgcattacctctagcgttacttcaatagccatgatcccatcatgctgaacgactttggcaatcagccgagcggggcagccgcaaaagcgaaagtggcggtggtcgcgaaagcccttaccacgactaccatcacagcatccatgtgtacagtagtatacacgcatcgcctccgtaaacgccttcggagggatgtgaaatttcacatagtgatacttgccagcaagccttctactcacatcaagtaaaatacagcacaacattgttagacctgtacagtgggtaatataccctttatgaacgtacttctgattgtttttctcggcggattctgacgaacgcaggcggtagtggagaagattcctcgcacagtagcttttccacgctacctcaaacgtattccatgactcgaacagcgatccatctgaaaacttgggaacttgtaccttgatattgctgcgccctgatatcattcgcagtcgttctccctgatgtttcgatggcctgtatataacatagtcgtcgctttctaatcggtcgtcagagcaatggctggtgaacactatgctatgaccaattacctggacttccggtttcggctgtattagtttgcttgcaactgaccaccccggggcgatttgaatcactgagagcgactttaagggaccttcgctttgatttggaagccttcttagcgcttgcagtcgtttaggcgttttgaacgggatttctattcacatttaaagacagaagatacatcagcccagcctcctccaattatcgattgataacaactcacccgtggatgctatagacctagagatcgtgggttcattttcaaaccgctgaacatcgcaatctaaatgcaaataaagcggaagcacgtttgagtcgcaatgcaggaacaacttgttacaatacctgtcgttaccggaatcgtcctccgtgacggagtccgctgtctctggaaacctaaaggcgcgcatggctacgctgcctgtctgctcgacgagacccgtctgcagtggcacaaaagtgtcgttatccagcgccagctatctcgattcagcgaatacagtatcagcgaattcagcaccagcgaattcagcaccagcgaatttagttttcagcgaattcggctcggcagcggtgctgctagatgttcgcgttgcgcaggggataccgcttgcactccaaacccgcaaaattgctactgggcgcttgtgcgcactgggaggggcttgtcgactagattacacagcttggaagtatcttgcaaccacacgacgcccgtttcctaaatttcacattgactcaatgttaatggcgcacaacattgtacacaatcaatgttactgatccgacacattgaggcggattttcaatgttactttaatgactctccggaactgctgggggtgtgatgcttgggacaccgtgggtacagacggcaggggtgatgatgccgcgtgacatcaaatcccaagcagaaggtgttcggttctcaggttattgtacgattcgtaacgccatcaatatgaaggcatactgtacagtacgtagtcagcaggacagtcggtcgacgcagtcccaagtaagagaattaacggttcatagtgactccgaaagtcaacaaatacaaattctagtgatctcttcttttgccttacagcaagcactcgaaccatttaacaggcatcttggcctcgttcagcagtgagtcacccgccaggaactgcatatcgaagtgattgagcttcgtccggtaaaacctgtcgcggtacgactttccaaacttcgactcggggaatccgacggcgcagctctggaactccaccatgccgtcgtgtagcttcgacttgtgcgggaccaacttgcccagcacccagaactgcgcctggtacgtcgacagcaggccggagaagccctccccgcacatcaaggcgtagacgttctccttataagccttctgcgctgctgtatacgccgcattcaacgctggggagctgtaactttcgccttcgtacgccagcgacttgatcgagatcttggcggggcatttccccgtgatttccccaaacttctccagcacaacgttcgtcttacccgcacacgagtctaggacaaagtctgaagccatgctgcccttcataggccccgccaaacccacccacgtcgagctcgagtccagctcacacagaccgttagcgatcgcacccgccagcatcaaattccccattgaatgcgtcactacgattgtatcggagatcgtagacttggtgctggtgtcactcactgagaggattctattgcagaccttcttctgtagagttttactgttccaagcgttgtggatcgtgtcgaggcgagcgtatttcatggacgagcagcacggcgcgtggcccgttagattcccccaataatgagggaaagagtcctggttctcggccatctctggctgcagcccctgaccgtggatgaagacgcacggccgcggcttggacgtacacgtacacgaactctcagtcacagaatccaacgcagccagcgagaaatcaaaagcagacttcaatttgcgagcgttcttagacgagataggctcgcccgtgagcagcgagtggccgatgggggtcaccgccgtgggcatggccactcgcgggcacttggcggcgttcaacgtagggggtactacctcaatctgactctccaggtagagcacggagatgtccatgtcgctgctcttcatcgtgaagcccgcgggtccgttggcgcacagagtgtactcgaccttgttgacctgcgtcttgtacgagctgccgccgtagcagtcggtgggggcggccgtggcgttggctcccgatggggtagaagcgttcttcgcgtcgttgatccccgccacgatggcgttgaccgcgggtagagcacctgactctgagtcgatgcacttggtcacgggggtgacgacccccgagccgctggagaacggcgtgtcctcaatgtacgcgacgctgtccacgagcgtgtagttgtgcagcgtgttgttctccgtgaaggtggcgtacacgtcgtacagcaccttggcgttgttgttggacacgacggggttggcgtacatggagatgtccgactggccgaacacgttcttagcgctctgcttgatggtgaactggaagcgcagtccgggccactccaacggggtccccaggggcgcccccttctggaggttgcgacgaaacgcctcagtctccgaagcgaacgaaagcaacgcggttaaggccaccgccacgttcagaagagagggggccatcttcgtcgagcgctcggacagcacaaatgcggaatgaaatgaacttggcgatgtgttcattatcggtaccctagcgcctagagcacacacaaccgttggtaatttatcctgctgtccgtgaacacatgatgcgctggaagcgctcgcgaatattctggcgctcaaatcgctgcgacttcgaggtcgtccgcgtggattctactgcgatcaattcgcccaattcaccacacagcgaggtgtcgattggctcttcccgagaacaaagcccaagatgctggaggacgcttttcttggaccccagcaggtgggtagaaaactacatgtacgtacacagtactggggcaaagcgatgcaacaacatggttgaactaaactgggctggcgaggtggagtgcggtggttgaaacgaaagcattccaggatcacagagagctacagggcggactattataccagtactgtatagtacggtaacgtcagtttattccaccgtctagtacttcgttatggaacttcgttatggaaactcaattcaaactcaccgtccttggtttaatccacttcaaagtatgtacaggcaactcaaccaaatttactacaagtacgtgtcgtcgactaagatttccgtcgatcccctacagaagacactcgaaccacttcaccggcatctttgactcatccagcagcgcatcgccgcccacaaattccatgtcgaagtggttcaacctcgtcttgtagaaccgatcacggtagttggcgccaaatttcgactccgggaaccccgcagcgcagctgtcgaactcgaccatgccgtcattcctctccgacttgtgaggaacagccttgccgagcatccagaagaccgactggtacagcgataccatacctgtgtagctctctctgcacatgggaaatgctagacaaaagtactagggacccgtgacattaccaataagtaccactaatctggtacatcaaatctgatgcagtcggtagctgcaggcagacatggagtacatcaactagtagaggcccgagacagacaccgagtacatgcagtactagagccccgagaccgaggacgagtacgtgtagtactagagccccgagaccgagtacatgcagtgctagagacccgagatagacaccgagtagatgcagtgctagtgttgcagtactagtcaccaacgtctctacatctaatcattccgagcagccacttaccaattacgcttggccgccgaccgtaactcctcctcctcctcactttacctatttttctgccagcctcttcttcgcaaagctactactcaaccgcgactgtgatgtggctgtctctgggctgtgaatggaggcccaccaccgccttcccagtgttgctgcgttgatcaaggagaatggggagcagcaactacggactggagacattatttcctattatcatcctatgttttttcacatgaaggtctctggcatccttgtgatcgcggtgaatcctgacgccgccgccgactactgatgctgaccacctgaacccggcgccctcgagttgaagttgttcatggagcctggacgtggagctggaggtggctgtagagcaagagggggagatggatctcaagaaggagcaggacgttgagcgtggagcaggacgtggagcaggcttcctactaacaagatctgactgatctaaataccgttttttagtattacaagtactcattgtcggtctcggggctctagtactgcatgcactcggtctcgatctcgggcctctagtactacatgtactcggtgtctgtctcgggtccctagcactgcatgtactcggtctcgatctcggtctcggggctccagcactgcatgtactcggtctcggggctctagtactgcatgtactcggtgtctgtctcgggcctctagtagttgatgtactccatgtctgtctgcagctaccgactgcatcagatttgatgtaccagattagtggtacttattggtaatgtcatagtacttttgtctagcatttcccactgcacatcgctgcgaatacattggctcgatacgcctcctgtgcggcactatacgctgcgtcaatctctggagagctgtagttcccaccttggtagggtaaactcttcagtccaggctggggtgggcatttcccagtcacttgagcgaaggcatttaagagaaacccttggttcccagcacacgagtcttgaacgaagtcagagcacatactccccttcatgggacctgcgatccccacccacgttgaactcgggtccagttttacacttcccattcgcgatcgctcccgccagcatcaaattccccatcgagtgtgtgacgacgatggtatcggagattgtggactttgagctggtcttgctcactgcagcaactcgatcgcagactttttgctgcagtgagtcgcttgtccagggtttacccgacgtgttgaggtatgtgtactccatggacgagcagcacggcgcgtgaccttccaagtcgccccagtagtagaaccgatctcggttttctgcgtgttcgctcttgactcccaaaccgtgcacgaagatacacggacgtgacttgggcttgcaggaacacgaatctcccagcgaaaaatcaaattcggctctcagtttgcgcttgtcactcacagcaattggacttccggtgagcaatgatcttccgagcgaggtgactaggcttgggatagcggtagtggcgcactcgctgcgtttgctggcgcttagttggggctcttctatctctgttcgaggcttcagttattcaaccgagacgtccatgctgctgccgaacaacttgaatcctgccgagccggacgagcacaaggcgaatttgatgccgttcaccaacaccttgaacaagttacctgacgtgcattcgatggggtcgcttaaacccccagatacgcttgacacgagctcggctaggttgattgcggattttccaagtgttcgaatccacgtactccaccaatggagctaatatggaagtagtcgacaggtaagctttgccgtgcacctccgagtagttgtagcgagccccgtcttaagtaaactgggcgaagatatcgtagagcacttcagaactaccagccgacagaacgggggtagcgtccatggagaactcggaccttcatggagctgcgcttgagtgcgaaggagaggtcgcaaacgctgaaaaccggttgtatgtatccggccgtgccaacctcgaggcaggattcggctgtccgtggacggccgtggaggaattaccatgatccagtagaaaagtactggatcgtcccccaggccgacggctattttcttcatacagtaaaaaaatcctaagtacgcccggcacgccaccatttatgggctaacttcgagctctcggtttatttgcgggacacctgaaatagatacgtgggaggtaagatttcgaaggctagtgctaaataaaaaccaagtagacttgaataataaataattctcttagtctgctgcattgtgcaaatgtccaagtcaagagcaaaaaaaaccaaactacggctctgctcgcttttcactcgacgtgtctgatctcgaagctgccaaggagttgtgactactcagggacgatattgcagtcgagtcgacgaacccgacaagctcaacgtatggcttggcctaccagctccgagagaatattgccaattcagtcttttcttcacaaaaagcagtccacagcaagcgcaaagatttggctgtgaggtgcggcttccagatttttgtgaagcagaccagtgtgaaggccgacaactccggtaatacgcaatttgcgtgcaaggcgctcaatggaacgcaatatttcgaccggactacaccagctgcccaactcacgtgtccgtttttcgtgaatgttcacgggaaatcggggaagtggaagataacccaggcaaattttgcgcacaatcacctcaagttcgttggtagtgccaaggccccttgtgttgaagggtccatcccgttgccgtccaagcccatgcggaataccacgcagcagataagcaagctgacagcgattgtcgagaccgagatgcttcccgcccacgatggatctacggcttctatgtcaggcgccgctatcgggaattttctgaaatcgaaagaagcggacgtaagcgctacatcggtgtccagaatgaagcagaaaattgacgacaaaattcacggcgacttggtagaaagttaccaaaaactgcgggtgtacttcgtgttgatggtgcacaagaaccccggatcggtttggagagcggaaactgccgcggacgcatcgtcgttcggtcgagcgtgcttcatccctaacgctggtattcacattgcccagaactgcaaaaagatggtcggctttgacggggtccaccttaaagaggaaatgcacgaacagggcatttatctggtagctaccgtgaaagactacaacaaccacatcgttccagttggactcgcgctggtttcacaagaggacaaggccaattggatttggttcctgggagcattcaaggaggcagttgactgggaaaacttcacgatattgtcggatagacataaaggtctgcttccagctgtcgcgacaattttcccaaacgctggccatcgatactgcctgcggcatatcatggacaacattaacaggaaatgttccaggttgtcccaggaagaccgtgcgtgggtatgccgaatggcacgcagcgactgtgaaaatgactataagctgtatcgaagtgaactcgccgtgaacaaccctgccactgcgaattttctggacggaatcgaacgtgctcactgggtgaagtacagtttccaagaaaagtttaatctcccgactttcgacgaaataacctcaaattcgccagagcaagcgaacaactggatgggtaaagagctttggaccgccaaaccctaggacggattccacttgtacttcttgaagctgagtcaactgatgtccaaaaggcgacaattgattgtaacgtgggcaaaatctggcgcactctcggatttagtccccaagttgttagagcgacgtacagaccgccaagctgcagctgatatgtgcgagtttacaccccttctcgagggtgcgtacagcgtcttgatcaagagccctgttgccataccaggatatgtgcacccagaccgggtagtggatttgccagcgctggagcgcacgtgcggcaattggcaagaccaaatgttcccttgtgtctacgcaatttgcgctgcttcaaaggatggccgacgaatcgaagacttgtatgtcgccaagcgtatgccgatcgagtacttccgcgatacgtacacattcaaatttctcccttggccgacaacagcaaccttacagcgggacgacacaattcttcctccacaacttgaacccactcctgaacggattggtaaaatagggttgaagccggggaagaggccacaacacaagcgaaagattgtgaaaaacgcgctgtagggacaagaataagcttcgtcgggcaaagccaatttatactttatccatctgtatttttgacaaacaacacttcataattaatagatattgtgctttccgacaattctaaccaatatgcaagtgttgctgagtcatatttgggtaaggtatattaaaaatctaaaccgatagatctctagtgttgtgccttaagaacacgcgagtaaaatatttcgtgaaaatctcttaaactctaggcggagtaggaactctacgaatgtaccactccatggtacaccctttttatataatttaagccgcaatggtgcaatatgctacgttgatctgcaatctgaattgtgcaatttaactacgttagatttagccaaatcacaacctgacctccgggctgaagtctactgtatttattttaaggcaacacttagaatagaaatagactgcgaactacattttcagcgcttcggcaagccccattctgctttgtgctcaatgccacgccttaacccacgacagcgccacgcccggaacatccagcgccgcctggacggctcgttttaccgtctccgactgaatcccggtatttccgctcatgacgtcagcgacgaagacaccgacgagcaggaagaggaagaaacatcagtcgggggtggactccgagaagaacgacgtaggggtggtggcctcttcgcaagcaatcgaagggcccagagaggcgtggatgggcagccgtatgagtttgagcgaatatacgcgaaaaggtggatcaacgtaagagtatattatctcattcaatgggttgggtaccgggagcttacatgggaaccgggaagccacgttccgatgcgctccgatgcgcctgaagctacggttcgaacgcgaatcgatcgacttcatctgggtctaccaatcggcaagagggagacgtcggactcgccatcgacgaccgacacgacgcagcgcaaggatccagtctcgcagaagtaagtagatacgtcttgacaaatacgcatcacgaacttagcaaatactgtgacagtagtttgtttttcagtcggcctggggggcgatccagtacttttctactggatcatggtaattcctcacggccgtgcttttcattcggccagccgtggctggccggcatattttggcttcggttggccgcaaatcagctgatattttcgtaccaagctatttctacatttgactggtgatacgaaaattattcaacgctggaggactcaataccgctacccttagccacaatactcattatcaacgtcaagtgcagtccttttggctataataatcgaagctagaacagctaaagttgatatcgcaatgaatctcggttatccgcagccggccgtggtgtccggccggacagccgtggctatccgtaatcacacccgtgagagatttcggctggccgcgtccacggccaaaaactatccgtacggctacggctggccgtttgcgacctctggtgcgaagtggaagcgaagcgatggccaatctgctgacttggcattctggtggtctttgcgctggtgttgggtcgttgaagtggtttggtgagccgtagaagtctgcgtgggggaggtgaacagggctgtgaagactgccgcgagccttaaaattgtcgacagcatgtcgctacaagtagctcgggaggttaacgagactgccgcttaacagtagtgagtctgattgtgactgcccagcgattaaagccttgtcgacagtgtcgaattgccgctgtgtcgagtcgactcagcggcaattcccatccggaagagcgccattcagtgcaccaactgggtaacgtaatactgtacacgagctttctgactgatcaacgttttgtactaaacattcacggcaacttcgtcttcatgaaaacgagcgagggtccaatctacaggagaggaacgggtcggattacaaaaatcgtgtatgatctaaagaagctgcggtgtgattacagaagtctgcaggcaatttacagaggatgccgtcaaagtacagacgcggacgcatcgattggtagggccctcaattggccagaaccaaagtaggtgtgtccatacggtccgagtggagtatttccacgacagttgcgatgcatttctagtcgatgcacgtgagacggtttcacgcgtacaggtccgagctcgtactccaaatgatgcagcttagggagagttttaaagcgcagtgcatgtgtgatgaaggacccgcgtcaggcagaactgttagtttgggtcttcttgggagggttgcctactgctgtgttgaaggcggtagaatagctcgctttgaatgagcagcggcgtcactgtcgactacaaatcgctatgtacggacgcgcgtagaggatttcacgacgatcccgcgtagactgagccgcacaaatagatacaggatgccaagatgccaagctgcagcgacactgacggtttaccgtgttggtgctgctctgcgtcggcttcaagcggtgtcttgctgccgctcgatgaatggcatttgaccgtcaccaaaaaataatctcaacaaaaaatctgacgaacgatgagcctccggaggctcatcgtttgtctggtttttggtctgatcttttgaaaatctttggcaaaaaatttctgatttttcgctactttgaaaccccctattggctcggtacgcctcctgggccgcagtgtacgctgcatccacctccggataactccactccccaccctggtacggcatactcttcgttccaacactgggtgggcactttccagtcacttctgcgaacatttcgatgaggaatcccttgttcccagcgcaagtgtccagaccccattcttcccttcatcggacctgcaatccccacccacgtcgagctcggatccagtttacacttcccattggcaatcgcccctaccagcatcaaactccccattgaatgagtgacgatgatggtgttggaggttgtagacttcgagctggtgctgctcactgcggtcgctcgatcacagatgtttgtccaacgtgttgaggtacgtgtactccatggacgagcagcatggcgcgtggccctccaagtcgccccagtagtagaatcggtctcggttttccgcgagctcactcttaactcccagacagtggacgaagatacacggacgtggcttcgacttgccggaggacgaaccccccccaacgaaaaatcaaactcggctctcagtttgcggttgtcactagcagcgaccggagttccggtaagcaatgctcttccgagagaggttacggagcttggaacagcagtggcgatacatttggatctagtgtcgacacttagccttgatctctgttcaagtctcaagatagtcaacggagatgtccatgtcacggctgtgtaacttgaaaccagacgaaccggacgagcacaaggcaagtcttacgtacagtaggagcaaaagtcctataatacgtaggacctcaaatcggagggcgttttgccagaaaggcacaatactgcaaactcttggttccaacttggcatcccaaatacaatttctctcttcgctcgatttcttgtggcggaagtagtggtagcaatggcatacgtgggaggaggcaggcaagtgattgagaaaaatatatgagtttggatcgattactacggcgtccatttagagggttgcggcgccaacaatggcgaccatttagagaataaagaggtttttgatcagttatagaacacctatagtgaaatccatacaatcacttgtgtcgagcattcgtaagacagtttgacgacaaatcaaatgtagcaatttcattggttaatattgtattatgtagtctcgagtgttgctgcatctcggctcgtaaattggactgatttatctgtgtgcgcattttgccccctttactagaggcagcgcacttgaaaaatgccccttgaaatgtccgggcctttgatcctgacgccatgcactaacctcctgctaaaagatttaaatatacttgccaagaatggaatgtaaggacatcatagcacagttatcatgcgaccgtttgttcccgtagtggagcaatgattcttcgctttactggggtgagcgactgttgtcgttcaccccaccacgccaactctcctttctacagtaaagtactaacactacatagaagatggagattcagatagagcgcgcatacgcaaaccagtctacgctgtagcatcgacaaaaagcatagctgccggcagtggcttagttgcaggagataccgagtaactcgccgatgccgaaggtcgagcccagcagcaatatggcgcgcgctgagcgcccgcgcagcagtgtggagctcctccgcacctcagcgtcgtaggtataagatctaggtattatcgccgttgcagagtacgtggttgcattttgttgctggactgtaatgattaggtaagagggtgttggagggtctcgggaagcccattggcaacaccgttacctggctgccactactatgatgtgcgctcaagcataaaaattactacattaaaatgtacatgtagtaccgttacgagctatttgtccctcttagtttacgtctgccaacttcatcgtagctccgtgccctacaacggctgcacctcttgagtggaacagctccacggacagcatgcacgcgttcgtgcagtcattatgccgatattaaagcttgctgccagcggccaactacaggcacatcgcttcgtgtgtgaacaagaggctacttaccctaccgcaccatgcaactgcatcgtttcggcgctcaacgttgccaccgcgtccgcggcaacgctgccgctgtgacctgaacacttttggccaattgtatggcgcaaactagtgtccgacaaactgtcttttgttttgacagacaatatgcaatgtagccactggtatacaaaaaccaagatgtagtcaaaacgcattgatcggagaacgtaagacgctttgtcttatgataggcattctggggctaagtatcgtcttacgaaagagcatgaatcccgtttgcagtcgaggaatcctaaccagatagggaacacatagtagatagggaacacatagtcagtttaagagggatgtccagataaaaaaagtgatagcttattggttggctgacttcttcagtcacagtgaaaaagtaagcgaaaaaagtcggcgttatgttctctggattttaatccagagttgttgggtgaatcccgaaaccccaaccaattttgaaatgatagcaccataatagatttatgtttgccttaaaccgacgcaatcatttcacgacaaaactgattcatgctctctcgtaagacgatactggtccctagagagcataccgtaagacaaagcgtcttacgttttgcaatcaacgcattttgattacatcttgattttagtataccagtggctacattgtattttgtcactcaaaacgtaagacagtttgtcggacaccagtttgcgccatattattggtcaaaagctctacttgacgtgcagagctgcatgtgcatgctcgggcccactgaaccacgacagcggtgcggatgcaggctgtgttggtggcacctttgttcgccaagacgacgcagttgcatggcgcgtaggtccgtcgacaacaggatgatattctggctgcagccacggcggccgcgccaggccttgcgtgaagccttagcgctaaggctgttctgatctgttgctcttaaaatgccacgtccagagcttttcagtgcctggatggtaacgaatagtgtcacgagggaaatattgtagaagttttcgtactgtcaggttgcaatgtacgtatcatgatgcgggcaagccttccttcaataacgtggtcagttacgtagcataagaggcagcgattctagagcgcttataaccgcgccagtctattgctgtctgttaagcttgaatttacgtagtgtttccgtttcggctttgttgacaagtttctagagagtgctcgagtgtacattctagtcgtttgctattcaatgtacgctcaagcacaattcagttctccgtgtaccaaccgcgtcgtgtcctccgaagggcatctccctacttacgccgactacgcggcttcatggaagagctcctcggacctcataaaatatgtataatacgcactttcatttgaaggacctggcatttagtaggtcgctagttaggccaaataactgtgatgcacttcacattactacgaaatcgaaaacgaaacaaatacacgttcatgctgccgattctgctcgtcagcacggctatccgttactacgacggtgacgcagacggcccggccaagggcatacacggacaacaccacgcataatattagccaatcacatggctaaatttgatttgtcgtcaaactgtcttacgaatgctcgacacaagtgaatgttgcttgtgcttcaatacacatcgaacataatgatggccatgaaactcactcactcgagcaacaaccatatgctcctgtaatatcacataccagagtattaaatactagaggtatacttaccaaaggaaacgaagctaccgtattcagaaaccgtagcaggatctttgctaaactgtggaagcaaatagcagaacgtgatataagtgagatgaatgcctcatcagcacaccaatacatactttgctagcttgccctcatgtaaatatttgagcggcaaggacgccggaaacgctgcaagtaagctcgccatcatggggctttcgcccaatgactagtgttggaggatctcaatcgcgttgctctgatgagttgtattgtaaatgaacacgctgcagtggagccttcattacaacctgtactatacaggccgacgccccccacccttccaatagattaaaaataaccatgatcatgttttatatcattgtgttaagcaaatcagagtctcgcgttaaccctttaaatattaagatcgacgagtcgaaactcagcggaacaccacgtcaactcaataccatgtttaatgataccttgcttggcgtgctctccggtttcctattggtagtgagtggtttacacctcaaacaccgcgtgataatcagtttgcgcggaaagaggatcacctacgagcaatctaaacgatcgacaaggcacaaccggcgaaactgggtggcttcattgagcaaagagtctttgccaaagacgtcgatcaagaaagccgccacctactacaaacgccaactgtacgtgcgcttgataaaacctacaatcccttttactttattaaatatattgaagacgaagtttagtgaataacacaagtggggcaatactgtatctgtaaacgttcatcaaaacatcacgacccatatcaagcgagcggccctgtcgacagcccaagtattgtgctttgcatccagtatgtagtgcaatacttagtgttcgcacttagcggtaaatcatagtggccttgaatgcgagttgctaagtcgagtctcgaacccggtttggttcggaaatgacactttctgaaattgccaaaaggtgctggatgtgctaaatcatgcaggagatggcgtatgcgcactacttagtgctgattgaccacccacggcttcagcaattcgtactcgagtacgatttagcaataagtcgtgctcgataagtcgtacaagttacagtccgaagtaccaaaagtctgcaaagcaatacatgtaaataaaaaaatgaaaaaagactcgaaaatccagagcttccccgtgcaaagcacggctttgtccaagcctggtaaaagtcatccaaccgactttttcgctgtaacctacggaatatcatactgcaacattcttttagagaggttgtttccttgaaagctccgagtgcgggtatttcctgttgcctaccgactgcggtggcggccactacagctcgcagtagaagccgaaggcgacgcgcacagcctcattatgccaacccggaaggctcaagcaactagatcaggcctagtcgggacgacaaagccaccagcgtcagcaggactaccggcctacaacaccgagtaccaagaagaaggaaactcgcaaaacagagagtcttctgataattcaccgtcaagctctgggacgtctgggcttcgtgagccccccttgaagagaacgagagtctcacgtcacacaccatctccgcaggaagaaaccgtacttggtgcgattgccgtcccagctacgggccaagttggccaaagcaactgggggcagagccgccaagaagaaggccaacagtcggcgtaaccagtccgacccgaaaaactccactcgcaagaccaccaaggtgaagacgaagccgacgtcgggtaacacagtggacgcagatggcgccgccaccacatagcccaatgcaaagaaacaaagatcaaagaagtctacggcgtcaaaggcgaaggtgaagtctacggcgtcaacggcgaaggtgaaggaagtgcagagcatgcagtggacaatccagctgacggctttggcaattgaagcgcgtttcaagaacaagctgattctgtcaaagttcgctgagcagctacaacatcttgtcggggagcaccgtgccggctttcaccgtcaagctcgtgggctgcagcaacgtcctgctcgtgtgcggcatgcccacgctcgacgcctgtagcagcaggaacgttcccctgcaaagcttcaggcaaccgcgcaaacccaactccgctagcactgacctgttgggaggcaacataccgctattgtgggctgtaagcaacaccgtctttagccagaagtgcgtcttctacctccactgcggcagtcgtggccgccagcgtgacgtctgtcactcctgagctgacgctgtcgacgtccatgacgtcaggttcatcgtcgctctgctacgcgccattgtggtgctgctcgatactgctttttcaaagaaaaaagtcagatctcccgggaaaaacaggtcccagacctacttcttttcaaatgacttttaagttggcaaatctggcacctgcttttttatctttcgttttttaaaataagtcggccaccaaaagtaagtgttttcgatttggacatccctcttactgttgcgaaagggtaagtgttcctgctccggccatggaggcagtgcaatcactttaagacctcgagatcgccctttgatgtaccagaccgccatcgcactgcacaaagctataagcttttccggttccgatccactaacagactgcgtgatgtctcctttgcaaggtaaacccaggaattctacaagagggcagttcttggaggcagcctccagtatattctcgaaatgtcggctcgatagcggcacactggcgagattcagacgctttagtttaggcatatacccgaagatcgtggcccagtcgatctccaactgctccaacttccccggtcctgggactgccacagaaatgttgtcgacaggtcccagatttactcggagcgcacgcacaggcgcacctttggcagccacaacttggatttcagctgcagcttgggcgggggttgcagaatcttgaagagagaacgccatcgtttcagctagtaactttttgacataatcccggatcaatgccgataaagacttggcaaccaacgcaactttcttcaagtcgtcgagcggcggcttgtacccgcgcatctccaattcctggctgaaccccgagatgacgaactccagtatatatgctagcagcaggcttgacggcattttggcaaatgttgagcatttagcgaaagagaattctgcgtagcgattgattgacctgcaatttgtagccatgtataagttgaaggcactgaagtgagggtttcgattctgtgcacctaagtcgtcacaattgaatcaaaacatgatggaggcggggcggcgcagcacgggcatgtcggccacgaacctgcacgtgctggaccggccgctgagccgcggcaagggcgaggtgagcctcagcgccttctccttcctcttctccgagatggtgcagtacttccagggccgcgtgcagaacatctcggacctggagaaccggtacgcagcttcatctccctctcattaccactgcactcccctcactcgatctcctatatactcgcagcctggacggcgccggcttcggcgtgggcgtgcgcgtggtggagctgctgtgccaccgcgagaagtccgggcggcgcgagacgcggctgctggccatgctgcagttcatcgtgtccacgtgctggaaggcgctgttcggcaaggcggcggacgcgctggagcgcagcacggagaacgaggacgagtacatgatccacgagctcgagccgctcaccaacaagttcgtgtcggtgccgcccgacctcggccagctggactgcgccgcgtacatcgccggcatcgtgcgcggcatcctgtgcagcagcggcttcctggccgaggtcacggcgcacacggtggaggtgcccggcgggcagagggacaagaccgtcttcctcgtcaagttcgacgagagcgtcatccgccgcgagcgcgtgctcacataggcaggcaggcaggcaacagtagagctgggtggagtcgagtcgagatgttaaatagaccacgcagggtcttacttacgagtgagtgagttactgagggaggtgtctagtgggacatgcggatgtcgtccatggcgctggcggcgctgggcggcggcggctgcccccacgtggcatagtcggcgcgctcgctggccttgtactcgtccacgaggttctgcaccacctcgcgcgcgctgtcgaactcgtccaggttctcggcgaacatgggttctttgcggtagttctcgatgaaggcgccgtgcttcttgagccggtcgtactgcagcagcagcttgtggaacagcgcgccgatgctcgtgtggttggccagcatcaacccgttcaccttgtgcgccgtctcgacgtacggcgacttgcgcgagagcgccacttggatggacgcgggtccccacgggatgaagcgcgcgagcttgcgctcgcggatgcgctgcagcgacttgtgcacttgggtcgggtccacgtcgccttggatgatgttgaggatcgagatgtagcagcccgtcttggtggacgtgctgaccatgatgttcttgggctgcagcagacgccgcatgacgtccagcaccgtggtcttgcgcaccgccgacacctgcgcgtcgatggtcagcggcgtgtagcccgtcatcaagaagtggcagcgcggggtcggaatcagggacgccacgaggccgatcaggtcgttgttcatgtatccagggtacctcagcgtcgtggtgctagccgccatgactgtagacactagagaattcaactgcgagaccgtggggttctcgacacgcaggcgctcgacggcaatccggttcagcgccgtgttgtccagcaccacgaccgagtcggcgttgagcacgagtcgcttcatcgtcagcagcgagttgtagggctgcaccaccacgtcgctctggaagtccgactggttggggaagaccgagtacgtctggatgagcttcttggggaagtggtcgttgaggttctcgagcaggtacgagcccatgcccgagcccgtgccgccggcaatggagtggcacagcacgaagccctcgaggctgtcggagccgtcggcctcgcggtcgatcatctccatgagctggtcgtggtggctctcgccctggtggtacccggacgcccagttgttgccggcgccgcctccttccttggacacgaagaagttctccgggttgtataagttcctgaaggtggaggtgctgatgctgttgatgacgcgcggctccaggtccatgagcagcgcgcgcgggatgtagtgctcgtcgtccgcctggtagaagaagacgtccttgcggtcgtggcccgacgtggcgaagtcctgcacgatgccgtccgccgagatgccgtgctccgcgcacagctgcttccagaactccatgccgatctggttgccgcactggcccgcctgcagcgtgatgatctcgcgcggcatggcttcgaggacgggcggagggggtcggtggatactgcgtgctggaagttgaaaggcggcaacgaagtggtctgtggcgggacgtgtatgcgaggtgtagatgtatggtgtggaccacgtggacagtggtgttagtcattctggtggtgcgccaattgctgctatcattgcaagaccaaggagggcgatattgttgttgctgctactgctgctcgcaatgctctgtgtagaccatgctgctttggctcgtgagatgctgactcggctgcagggatggagtcagttcatggttgttttgccgaggcaaatcgcgttgatggagatggtatccgatagctatgcgacgcctttgcggaagtcaatggaaatggccagctttggcgtctgcccaacgccacaacaaccgccaatactctcgtaaagcgagtcaactgaacttgcattactccccaagtacatactgtacactcccgtggcgaatgcgcgcgtgggcggcgcgtgctgcgagtggctacagcggcctgtgtccactggcctttttcggttcgtgttgtactcggacagttttatcttgcgtttcgtataatcccctgtcaaagctgatacacacgatcgctgccgaagtcggaggcgtccgacctcagtctccattccgcgatccaagccaaaacaagcaccaccagcatggccgccgccgcccgctccgccgccaagagggcgcccaccgccatcgccatgttcaacatgggcggccccagcacgctgccggaggtgcagagcttcctcacgaacctcttcacggacccggagctgatccccatgggccccgtgcagaactacgtcggcccgtacgtggccaagcgccgcacgccgcagatcgtggaccagtacgcgcagatcggcggcggctcgcccatcctcaagtggaccaacatccagggcgagaacatgtgcaaaatcctcgacgagatccgcccagaggtgcgaagcgggctgcgatggcccagcagctacgttaaggattgatgctaatgttgcacttgtgttattgttgctgctgtgttgcagagcgcgccgcacaagcactacgtgttcttccgctacgccaacccgctgacggagcagtcgctcaagcagatgaaggaggacggcgtcacgcgcgccgtggccttctcgcagtacccgcagtggtcgtgcacgacctcgggctcgagcatgaaccacctgtggcgcgagctggaccgcctggacatgaaggaggacttccagtggtcgctcattgaccgctggaacacgcacccgggctacatctcggccgtggccaaccgcgtcaagatggggctcgagcagtacgcgcccgaggacagggacaaggtcatcatcatgttctcggcccactcggtgcccatgaagacggtttacaagggcgactcatacgtgaacgagatcgcggccacggccgagcgcgtgatgaagcagctcgcgggcaagaacatgcacattctgagctggcagtccaaggtcggctacttgccgtggatggggcccagcaccagcgacgtgatcaagcgctacggacagcagggacacaagtgcgttgctttctgtgcatgaattattatctatgtggagctgacttttgtatcttttgcttgtcctcaggcacgtgatggctgtgcccattgctttcacgtcggaccacattgagacgctgtacgagatcgacatcgagtacggcgaggaggcccaggccgctggcatcacggtacgctcggtctgctgatctgagatcggaagactattttctaacagttcatgctcgctaatgccttcaaccagaacttcaagcgctgcccgtcgctgaacgacgagccgctgctgttcaaggcgcaggctgagctcgtgaagcagcacttggacacggaggagctgcactcgcccgcatacccgctcaactgcgctggctgcaccaaccccatgtgccgcaccatcgtgaaccctatcaagccctacaagaagctgctgtaactcggtggcaacgctaccgccgtagactttttgcctaccagttaaccagcatctctcgcaatgcaattgtgtcatatcatagacaatctgaactccttgattcgtgtccatcagtttccattcattcggacttttgcaccaaaaccagaatttcttcaacctgcaatgctgtcgtcacgcgagcgtctccaagaacggcagggccagtacgccgccccgcgccacgaatacctgcagcagttggtggacgagttccagcgctcgcccgacatcctccgcaaggaggaagtcgtggccaacctggccaacttcgcctacgaccccattaactacagctcgctagcccggctgcgcatcatggacctcttcctcgacatcctagacgccgaccaagaagacaacagccttaccaacaacaacagcaacgaggatgaagccaagcagcaaggacctgcaactactgcttccactcgagcttcacggaagcaaaagctggtggaatttgctctaggaggcatctgcaactgcatcccagaccccatactgcagcagcagttcatcgacggagagggcgtcgacattatggctccctacatcctcgaagcgcagctcgacagccagccagcagcttcggagctcaacgtggcggtctccgcattgaccgccgcgtatttcctcctggactcaagtgcgttcgcagatatcactgctcagaggttcgtggccaagatgcagtccttacagcagcactctatcgcccaggtcgccaacacggctgctgcattcctctcacgctaccaggaggtcctcaagactgcataactgacgctatggtgtcgtacttaatcgagttcaatacattccccaagtgaatctttcggctcataacggaaaacgcgtcatatcgaccgaagatgctggacgaggacgcgctgcagacgctgctggagatgttcaagtaccttttgctgggcacgaacgtcttcctgttcctcacagcggccacggtcttcttcacggcctcagcctcagagactcccgcgtcctcgtcgggccccgcgcagctcaagcgggcgctcattgtgaccgcccacccggacgacgagagcatgttcttcctgccgttggtgcactcgctgcagcagcctcaagagagcagcaacgacaagtggatcacgcacttgctgtgtctctcccgcggcaacttcgacggcttgggggatattcgagtgaaggagctcctggcgtgcgccacgtacatcggcctgtcgacggatcatgtcaaagtactcgaagacccgcagctccaggacggtatgaagaaccagtgggatgtggcgcatattgccgcagttgtcacggagtatatggagaaacacaacatcgacgcggtgagtaattaattccgtgaagttttcggatacttttcgagtattgatgtgacttttgtttttgctgtaggtcttcacgttcgatgactatggcgtgtcgggccatgcgaaccacattgccacgcattatggagtgaagcaagcggtccgtgagcagcaggagaagtgctctgcagttgctaatggagaggataacgttgactcgaagattgagaagacgaaggtggttcgtgggtgggcgttggagagtaccaacatcttgagaaagtacgtcggactgctggatgcggcgctgtcgtactggctggcgcgccggaaggaggacgagaaggaagaggagcgccaattcgtgtttgtctgcaaaccgaggtggaactacaacgcgatggcgctgcaccggagtcagtttgtgtggtaccgccgcctctttgtggctttctcgcgctacactttcatcaacaccttccgctcgctgttgacagttggcaaggctgatcttccggcagagcagaagaagacgcagtaacatgatgaagggctgatgaaaaaagaccataaaattcaaggtcaacttttacttgggagataaagtttttgtgtgtggactcggaataaatgttttgtcgctggccgttgggggatatacacgtacgtctgggcggccgggagaatgatggacgtcaattcgttaatgaacatcttccagtataatttcaaagtaaataataccctaattgtaaaaagaagatgccgaaaatgaaaaactgggtttcatcatactttctttttatgtccgcgctgctctaacctgctactcgtcatttgtggacgcgcagccaccaccgcaaggcggagtcgcctcaaaaatgctgctggcaaaccgacaagttgatcggatgatgctgcatgaaaccagcgtaccacgcacacaacacccgacggcgggtatccagcccagccgctgctgagtattccaaagtcaaccccacacaaacttccgcacacttggctagcagcttgaagcgatcgtcggttgaagtatcatcgccactcgattcttcctttacgatattgtacagccagtcgatgactttctccacaaacaactcggttcgagacctggggttctgcgtatcactcgccttcgatgccacagccagcgcaatgtggctcactaccgaaatgatcccacccttggtctccaaagatccacgactaaacagctcttgacaccgttcgatactgaagatctgcgtgacgacgtcaagaccgaacactactgtgcatatctccagactcttggccagctcgtagtactccgctgctgtgacagtagccgagagtttatcgtacagtgtctgcacccatgatcttgagaagctagggtctgctccgtcagctccggcatctggatggcatcagcgatgcgatgcagcatcgtgtgactcgactggtgcagtaacagctcttgcctttcagcagccacgcaagagatagcagtcagagcttgtagtagggtttccttcagcatatcttggcgctcgacgcaatgctggtcgaaactacgctccagtatggctgggtaagtctccaccataatcgcagcgaagtagagccccctgatgttcgggttgtccctaagaagatcgaagagaagcacccgagatcgaccgagctgtctggttgactgacaaaggtgcgtgtgtagcgcgcagatatgcgccaagaacaccttgtcttgactgacggacacctgccgcgccgaaatttgtagttgaatcttgctggatgtcatggcgtcaccgatattcgttcgctcctccaccaagaaatctcgtaaatgctctaagcactcctccaccgttgacagacacatcgatcccgaggctgcgtcgccgatacgcactaattttaacagcagctcattacagagccagctaaggcccagccttcggtcttgcatcaaacgtcgagattgaagggcccggaaaatccctagcactccacgcagcacggtcattggtgtgactcccagctcacggtacgaatctgcaagaacgtggcgcagtgttctctgcaaataataataaaaacttaggctagaacttcgtgtcatacacaaacacacagacaacgttcagtgcagcttatcacgtgagcaaggtttgcatcgacaaacttggagctctggttgaccagtagagcgatggtgcgcctcgagtagtctttatcggcctcttcccccttggtcagggcgatggatttcgtgaaccctgcgagaaatttcttgatctgcacctcttccttggattcaggtcgagctgcaggcttagtctccgtcttcttggcttctgtagttgcatttgtaggcggatttgctgtccgcccttgtgctgcgtccacgactggtacagaggcccctcctccaacctttatcttcttcttggcgatggtttgagttctgctatataggtttgcttcttctgctttccgggtctttccaacgatatcgcctttcgtcggggcagaaggctgcgcgtgaggtggagtcttgctaccatgagagtcatcttgctcagagcgtttggtaggctctaccatcaagttcgacgcagcatcatgcgagacaaccgccgaagtcgcccctggatcagtagatctaccttcagttcttttgccttgctcggtggattcagcaagctccatcatcgagctcacagcaggattgggagatacaaccgccgaagttgcgtttgactgagtagaatctgctgctgcgtctgttagttcatccaagttgatccgtggagacacaactgctgcctgcttcgatggtgatatgcttgaagagtccgcaatagatgacgaaggttcgatgtccatagctccgattgtttcagcagcattgacgacgtcttcacccgcagccttgttcgcgttgacagcgtctgggctacgggcttggactggtgtctgctgagacgcagcatgaacgctgggcttttcctctgactggctaattgtttctgttgtaccattcagcttcagaggctcgggggcctttggctggggatcgacttccactattggagagtatatctcttctgtgaacgcagcaaccactggcgttgctgtgaagctgctgattttcaatgttgcgctcttgtcgatggcaactccaccgcgtgctaaactcacctccttcttgtccacagtaccaatcattggatcatccgcgtcttcatccgagtcgctgtcgctgctatcgcttgaatcactgccactgctggagctgctggagctggaacctgcatcctccttctttccatcagtcatcttcctcccctactgctctgacacagagtcggaatcccaagctgcaaattcgccgtccagctcgtcgtcgatagacatcagtgtccgcttgccggtgggcatattcgcttccactccgttcgctgaacctgtttgtttgggctctttcgggttgccacggatgtttggtttctctacttcgtcttcatcgtcgctgctcgttaccagatcatcatcaatcgcactggaaatcgcccgatccatccctctcagcagtgaatgcccacttccacttgctttggcagcagaacggtcaccacctacatccgcaccgaccttgctagctggagctgcttcagctgcccgtcctccaccatcgattcggccttcatcgttctcgtcgtcgtcttcttcatcgctactggtctccaggtctttgtcaatctcattcgccacagccggatcgagtccatctagcaacgacactccagctggatcacgcttaccactacttcctgcttctccttctccttgcttcctcttctgtccttctccgccctcgtcctcgtcgctgctactcgccagctccttgtcgatctcatccagcaccgtggggttgaagcccccagccaatccagacccacacgctccactttccttcgtctcaactgaagtgtcctccttcgcagtgtccacctgtccctctccgtcgtccgagtcactgaacgccaactcggcgtccaacgctgcgctcgtctcgtgcgggaacgccgcgtccgacgtccccagcatcggaagctccagctgcaggggctccggcgacgtccacaccgtccctgcgtcctgtccagcagaagccacatcctccatcagcacctgcgtgtccatctccttcaggtcgcgcgatagtttgggcaccaactggtccgtctcggtctgcgtggaggcgggcacttgtcggtccctgcctctcttcctggacacaccactgtccaccgtctgcacaccattgtccaccagcgtcttcttgttaactcgttgcacggcaccacttaactgcgtctgactcgcgcgcgtcagcgtcttccgctcgtccgtctgactaaaagcgtccttcacggacctcttcgcctttccggccgcgcgcttcagctgctttttggcccctcctgcagctcgcgctgcagcgcctccacgcgcaggcggtactccttcaggcgcgcggccgcctccttgagcttggacttggtcagctgcttgtactcgctgcccttgcgcacctgccgctgcagccgcgcgatggtctccgcctgccgctcgatgatgtccgcctgcgagagctggcccgccgccgccgcgacatcgacgtccattgactcggccttgctccatgaattgagtgggtgttggctacataatgtagtcatgacgggtacggtttctgtcccttttgtgtagaaacacataatgtagccgttctatggatgcatcgccgagtataccgtcgaagtgaggaattgtcgatacagtgacacccctctaagagggatgtccaaataaaaaaacacttacttttggtggccgacttattttaaaaaacgaaagataaaaagcaggtgccagatttgccaacttaaaagtcatttaaaaagaagtaggtctgggacctgtttttcccgggagatctgacttttttctttgaaaaagcagtatcgagcagcactacaatggcgcgtagcagagcgacgatgaacctgacgtcatggacgtcgacagcgtcagctcaggagtgacagacgtcacgctggcggccacgactgccgcagtggaggtagaagacgcacttctggctaaagacggtgttgcttacagcccacaatagcggtatgttgcctcccaacaggtcagtgctagcggagttgggtttgcgcggttgcctgaagctttgcaggggaacgttcctgctgctacaggcgtcgagtgtgggcatgccgcacacgagcaggacgttgctgcagcccacgagcttgacggtgagagccggcacggtgctccccgacaagatgttgtagctgctcagcgaactttgacagaatcagcttgttcttgaaacgcgcttcaattgccaaagccgtcagctggattgtccactgcatgctctgcacttccttcaccttcgccgttgacgccgtagacttcaccttcgcctttgacgccgtagacttctttgatctttgtttctttgcattgggctatgtggtggcggcgccatctgcgtccactgtgttacccgacgtcggcttcgtcttcaccttggtggtcttgcgagtggagtttttcgggtcggactggttacgccgactgttggccttcttcttggcggctctgcccccagttgctttggccaacttggcccgtagctgggacggcaatcgcaccaagtacggtttcttcctgcggagatggtgtgtgacgtgagactctcgttctcttcaaggggggctcacgaagcccagacgtcccagagcttgacggtgaattatcagaagactctctgttttgcgagtttccttcttcttggtactcggtgttgtaggccggtagtcctgctgacgctggtggctttgtcgtcccgactaggcctgatctagttgcttgagccttccgggttggcataatgaggctgtgcgcgtcgccttcggcttctactgcgagctgtagtggccgccaccgcagtcggtaggcaacaggaaatacccgcactcggagctttcaaggaaacaacctctctaaaagaatgttgcagtatgatattccgtaggttacagcgaaaaagtcggttggatgacttttaccaggcttggacaaagccgtgctttgcacggggaagctctggattttcgagtcttttttcatttttttatttacatgtattgctttgcagacttttggtaattcggactgtaacttgtacgacttatcgagcacgacttattgctaaatcgtactcgagtacgaattgctgaagccgtgggtggtcaatcagcactaagtagtgcgcatacgccatctcctgcatgatttagcacatccagcaccttttggcaatttcagaaagtgtcatttccgaaccaaaccgggttcgagactcgacttagcaactcgcattcaaggccactatgatttaccgctaagtgcgaacactaagtattgcactacatactggatgcaaagcacaatacttgggctgtcgacagggccgctcgcttgatatgggtcgtgatgttttgatgaacgtttacagatacagtattgccccacttgtgttattcactaaacttcgtcttcaatatatttaataaagtaaaagggattgtaggttttatcaagcgcacgtacagttggcgtttgtagtaggtggcggctttcttgatcgacgtctttggcaaagactctttgctcaatgaagccacccagtttcgccggttgtgccttgtcgatcgtttagattgctcgtaggtgatcctctttccgcgcaaactgattatcacgcggtgtttgaggtgtaaaccactcactaccaataggaaaccggagagcacgccaagcaaggtatcattaaacatggtattgagttgacgtggtgttccgctgagtttcgactcgtcgatcttaatatttaaagggttaacgcgagactctgatttgcttaacacaatgatataaaacatgatcatggttatttttaatctattggaagggtggggggcgtcggcctgtatagtacaggttgtaatgaaggctccactgcagcgtgttcatttacaatacaactcatcagagcaacgcgattgagatcctccaacactagtcattgggcgaaagccccatgatggcgagcttacttgcagcgtttccggcgtccttgccgctcaaatatttacatgagggcaagctagcaaagtatgtattggtgtgctgatgaggcattcatctcacttatatcacgttctgctatttgcttccacagtttagcaaagatcctgctacggtttctgaatacggtagcttcgtttcctttggtaagtatacctctagtatttaatactctggtatgtgatattacaggagcatatggttgttgctcgagtgagtgagtttcatggccatcattatgttcgatgtgtattgaagcacaagcaacattcacttgtgtcgagcattcgtaagacagtttgacgacaaatcaaatttagccatgtgattggctaatattatgcgtggtgttgtccgtgtatgcccttggccgggccgtctgcgtcaccgtcgtagcaacggatagccgtgctgacgagcagaatcggcagcatgaacgtgtatttgtttcgttttcgatttcgtagtaatgtgaagtgcatcacagttatttggcctaactagcgacctactaaatgccaggtccttcaaatgaaagtgcgtattatacatattttatgaggtccgaggagctcttccatgaagccgcgtagtcggcgtaagtagggagatgcccttcggaggacacgacgcggttggtacacggagaactgaattgtgcttgagcgtacattgaatagcaaacgactagaatgtacactcgagcactctctagaaacttgtcaacaaagccgaaacggaaacactacgtagattcaagcttaacagacagcaatagactggcgcggttataagcgctctagaatcgctgcctcttatgctacgtaactaaccacgttattgaaggaaggcttgcccgcatcatgatacgtacattgcaacctgacagtacgaaaactcctacaatatttccctcgtgacactattcgttaccatccaggcactgaaaagctctggacgtggcattttaagagcaacagatcagaacagccttagcgctaaggcttcacgcaaggcctggcgcggccgccgtggctgcagccagaatatcatcctgttgtcgacggacctacgcgccatgcaactgcgtcgtcttggcaaacaaaggtgccaccaacacagcctgcatccgcaccgctgtcgtggttcagtgggcccgagcatgcacatgcagctctgcacgtcaagtagagcttttgaccaataatatggcgcaaactggtgtccgacaaactgtcttacgttttgagtgacaaaatacaatgtagccactggtatactaaaatcaagatgtaatcaaaatgcgttgattgcaaaacgtaagacgctttgtcttacggtatgaccagtatcgtcttacgagagagcatgaatcagttttgtcgtgaaatgattgcgtcggtttaaggcaaacataaatctattatggtgctatcatttcaaaattggttggggtttcgggattcacccaacaactctggattaaaatccagagaacataacgccgacttttttcgcttactttttcactgtgactgaagaagtcagccagccaataagctatcactttttttatctggacatccctctaagtatctgtttgatgcgttggctcgatactgtccaggagtcaagtttgtggccaagtatccactcgttaatttcgtcgaccaagactattacgatgacaagtgggcgatttcgttggagacatggaaaacatttaacagatcttacacggcattgacgcagtttcattggcaagttgtccctttcgctgacccatactttcgtgcatttggcgaccacatgaagcctcagctgaagacgttgacgctttggtcgaatccaacgtggaaatataagcggtatatgcatgaacttgaggagacttatctggtcgaagccaggggttgcccaggttatggcgtgcgagcttccgacgtcgccgcagtgttgaaagcttgccctgcgctgacgatgctatctatcgaaatgcaccacctcgggggctatcgcacagacgagatgtacgaagatgtggaggtttacggagatgttttctgggaatccgctgctcgccactgccccaacttggagagaatctccgtgtctacctgcgaccacgacgactaccatacaataattgcgaagacactcactgatcggacgttgatgcacctcgctgaactcccatacttgttgaagtgtgatttgcctctgggtcgagtgaccggtagaggagtcttcgagtatatccggttggtgtcgaagacgacagatctgattgggaacaagcgtagcattctgatcagcattggcggcgttaagcggaaacctgtggagatgccagtctcccactctgaaatcctggagctgatgaagctgctagcggaaacggacgaggtatcgcttggtgcggcattttgccacccaaagccaaatgtggtcgtatatcgcccttacgaattcagccccggccgcgcttggcttagtacgtacactcaaaatgaattgaggcccgagggaaactttttcgtgcgcaagtttgacccttgccctgcgtagtaagccatctatgataagcactcggatctacatataacgaactttaaggccgtaactacagcagcagcgaattcattgacctaactgtgcctacagaagacactcaaaccacttaactggcatctttgactcgtccagaagagcatcgccgctcacgaattgcatgtcgaaatggttcagcctggttttataaaaccgatctcggtaggtatcgccgaacttggactccgggaagcccccggcgcagttgtcgaactccaccatgccgtcgttccgcttcgacttgtgagggatcgactttccgagcatccagaaaaatgattggtacagtgaaacttggccatagtagctcttgctgcacattaccgcaaatacgttggcccgatacgccttttgagcggccatgtacgctgcgtcgagctctggggagctgtagtctccgccctggtacgccaacgacttcaatccagttgtcggcggacactttccaattacttcagcgattgcctctaagagaaatcccctgttcccggcacacgagtcttgaacgaagtcagagcacatactccccttcatcggaccagcgatccccacccacgtcgaactcggatcaagtttacacttcccgttcgcgatcgctcctgccagcatcaaattccccatcgagtgcgtgacgacgatggtatcggagatggtggactttgagctggtcttgctcacttcagttactcgatcacagactttctgctgtagtgcttggctggtccaggggttgcctgacgtgttcagatacgtgtactccatggacgagcagcacggcgcgtgaccttccaagtcgccccagtagtaaaatcgatctcgattccgtgcgtgctccttcttgatccccaatccgtggacgaagacgcacggtcgcggcttcgacttgcaggagcacgaatcccctaacgagaaatcgaactcagctttcagtttgcggttttctccgactgcgatggggcttccggtgagcagcgacctgccgagcgaggtcaccgagcttgaaagagcggctgtggcgcattggttacgtgcgctgctgcctagttgtggctcttcgatctctgcccgagtcttcaggtattcaacagagacatccatatcgcttccgtgtaacttgaatcctggcgaactggatgagcacagggcgaacttgataccgttcgccgacactttgaacacgctcccgggcgcgcattcgatgacgtcaccagtactcccagatacacccgacacaggtacagcttcgttgattcccgatacgaaagagttgatcgacggaaccttcctcgattccgagtcaatgcactccaccgatgaaggcaagttcctgttgtcggagctggtcgacaggtaagttttgccgtacacctccgagtagttgtaacgtgtcgtgtcttcagtgaattgggcgaagacatcgtagagcactttagaactatcagccgacagaacgggggtagcgagcatggagaactcggactggccgaacaccttcatggagctacgcttgagtgcgaagtggaagcgaagagaaggccactctgccgtagtggcataatggtggtcctgagctgcctgcgtggggaatgtgaaccgggccgcgaagactgccactaaccacaaaggatgtggcagcatactgcaggcgtctagggaaagtcgctgagctgaaggtgcggagagaagtcgtaatgagcgcggctggcagcaactgactctcgtggacgaccgcagtggaacggcgcggcacttcccatcgtggaagagaacgtccggtacttgcagttcagggttagagtgcttgccactagcgggaacttaaaataccgaatttgctagcagttcccatagttattttggcgctgaatgcgagttgcaaagcattgtattccatctgagcgtgatattacttatgaagttgaagctctagtctaaggacaagatcacgggcaaaccgattccaatcaattgcaaagtatttacgatatgaactctggtacctcactttagaactcatgaaaggtctgttcacacattaccaacaggtgattcctcactaatgacatcttcgggaggcgcgaaattcttaaattatttaaacaaatgatttcatggctagcagcacatgccaagaagccacacgtgatattctctaagcggatagcttagagccagcgtcatttcttgtcagaccatcagttttaaacattcggtactttttaatatgaacttgagtattcaaaatcggctggtactaccggtataaagcagcagaggcggtcggatcgatgtatttaacgagtattcagttttagaataaaacgccgcacgtgtgggccttagcggaccgacttcggaggcggcgcgatgaacgatcggctgcgctgcgcattgcagcccattgatcaacattgtgttcatcacgccatggcccatgccgagcgccacggtggggctcgtggagatcgcgtcgccgcagtacgtggcgcacacagctcatagagctgcgtggtcaaggcaatgataagcacgtgtgggcctcaccgaccgaccattactacttcggaggcggcgcgatgaacgatcgcctgtgctgtgcatcaatgcccattgatcaacattgttttcatcacgccatgttcggtattcgctgggcatgctcgacggcacgccgcatacgcttgaccatgccgagcgcgacggtggggctcgtggagatcgcgtcgctgcagtacgtgacgcacacaacagagcaacgtggtcaagacaatgataacagtatcatgacatgcaaatgcaaccccaattattcttgttagctcgtcgtgcaatagcatctcatcgtaccataaccatggtggatgggataggacgccgcgtctgtcgtcaggcgattaaacattccaaaagcagcacgtctttgttaacgaccgacttgagagtagccaggtcaatatcacctggggcagtcagtattgtactgctcgctaagcactgtacgtgatgccgcccttcacgacggggaaagcccacctgtagattggcgtggaaatacagtgatcttggtcgtatccagcgaccatatgcgccatggtgataaacagctacgcaggagtgaagggctgacgctgtagtcgacaggtgctgtgtgggccgggccagattgaatttcaaccacagtacagtgtagagtagtgcgtaagtaagaatacagcatagaccttcaaggccatgttgattgcagtgacagcgaacctacaccacccgctgctggtttatacgagggctggacaattaagttaagttctgtcgtaacccagatggtccaacccacgcataaagctgcagatcaagtcttgtagcaagttgcaagtttggtttgctacaaaccgtcgagccgacgcgaaaggactatagcagggacagcgcttgggcattatcaaggcaaatcccagaattattcaaggcaagtcccagagacgatttacttcaatatccctgtgcctagcgtgcgcattcagcagaaacgaattgtcagtcaagcacaagcatcggagctcgagtgaagttgcgcctcatggccgaagaggacccgttcgctgagatggacgcgatgctcgcagagcaagtgcgcctacgggtactcccgccgaagcaaacggtccgcggggtgcgcgagttctacctgacgcacaagccgaaggaggacgactatgttggtgtgactctgtgtgtcgctgggatcgaggaccagccctagctgtatcggtacgacctggtcgacgcgattttcgagggcaaagaggatgggctgaaggcgagaatggccaagatggaccgcgcgatgcgcaacactatcacgttgcaggtgacaatgtggaaacctcgtaagcgtcccctgggcggagttcgctgcccgcaccgggttggcgaagtcgccgtcattggcaaggtccgcaagttgcagatgtaccattcccttctgcaggggcaagtggaggcggaggattggatggctgagcaggagcgcggcctctaagcggtccgacaagttggaggcggcggcgattgcggcagagtgacgtgctttcatgaaaatgctgaacaagatgccgagcgaactacccacaaccagtgttcagcagtttgcgttggatgataagcatgagcttggttcatgcagggaccaccagaagaaaggtatttagcagatcatcgtggtaggtaagcctagtttaatataacgagttgtcagtgtcaagccatgcattgtccgttttagaagtttgctgggaagtagttgggcacgtcgctcttgtgccgtccaccaccgtgatgctatagtactggtatggctgcggcaggttcctcagcgacatacttcgaccgagtagcgagttgctcatcagcctctccaagacttggtttcgccgtggatcttgcagcagttgcgttcgttgaagagctgcatccacaataaagtaataagggcatgtactgcatgggatcgggcttgacgtcggcagtcaggaccagttaccggtcggaggggaagctcagcagcttctcgcccacgaatatgagcttgagcaactcggagctatagtcgacgatgatctttgacaacagtgacttgggttttgggtacgagggcagtgtgggggtgggcgtgtggtcatcttgacagcgggaccgaagcctggggtcatctcgccagcacgcccacgaccatctcgtgcgtcgaggcactaacctcgactaatagtgcaattgtactaacagtgacgcactattagtacaactgcagtcactggccaaaatttcattttctcctccaatcaaatttttcagtttcatattttccagtaaccaaatcttcagatatttacttctgtagtagcaaagagcagttttctcggagacatccaatggaggaagagactaagtgtgaagatggcgctgggtgcgggctgagtgcgcaggtgcgagcgattcgtagtagccctatgtatgcagtactgcttgcggaacaaagacgaataagaacagaacgagaacaagcttcggatagcaataagcgcagacacaatgacgaagataaccagccgagtcggaaacgtcgtagagttgatagacagcgggaagcagagtatcaacgccttcaccggcttcgaaaccaaacattaagagatgagactgcgttttatacctccgcggagctcgatgcaatggatggccctttaaacattaaggtaccaaccgaggtagacctagctagacttcagcgttctgcagttaggatgtttgatgcttcaaccggtgaaggagcaatttgctgcgtgtgcgagcttttgcatcctatgaatgatgtacaactgacacctttgacggataccattgccgaggtaagatgttctctggttaatttaggtgtcatgcgaaacttctcttaccctcgtgttcgacagagcatgacgcggttattgcggatacccgacaacgcagatataccagagtttatcttgaagcaatacgacgcgtcagcactcgatgctcggatgaaggaccttctccttttcccaccaggtaagatacaatggaaacattcagctactactgtgttctcatactcgttctaatgttgtagccattcacagagaaaataacacaaccattatgcaggtttgtcgcgactgcttcgaatatatcagcaataaaagtaatcgcaagcctcctgctttcgccattgcgaatggcaattatgtaggttggctaccgcaagagtttccaccactttctcgtaccgatgaaccagccattgcattggtggcaccttgcgtgtccatatcaacagtcactggaggaaattgcaatacaatacgatcacatcactacatggtgaaaaattctgaagggcccattgtttccatgctccctcgcgatatctcagagcgcgtgcgcgtgaccattgttggaaatctaacttctgagcaagatgcagcctgtcggaaacgctatgaattaaatgttgaaaactgccgccaggtagtgacatttctaatggaaaacaacaaggtatatcgagaacataaagatgagtggcaattgaatgcaaacgaaagttgtagaacccgaataatccaaagaacaggtacatcaacattaaacagtgataatgatagtctagccgaagctgtaagagactacgctacatacaacaacgccggatctgccattgcctagggctctgataaatctcttgaaagttgttggataggaacctctagccttatcatgcagccacctactatcacgaatgatgttgttgtcagaaaatccaatgcgtttgtgtcggcagatcgctggaaggcatgtgtgcaaatgtttccgacattatttccgggaggttgtgggggtccgacagaaaagcgcctcaatcctatttcagtggagcgatggatacaacgcctgctacatatcggggatcatcgatttgaaacacactatgcttttttactcctcgcatttgattatctggcactgcaaagtgcaagacaagcatggcacattaaacttcatgtgtcatctgacgcgttaaaagcaggattgatctcccgtggtgtaattcgtcgctccgtggaataccacgcccatgttgttacagcagaagcgcatggaaagaagccaaatccacccccaaaagaggttcaacaggttattaacctacgtagagatcttcgtaccagtgagacaacattttatggatcgaatttgagcagaatgcgagcacgacacgatcttttcggatatattaaacgttttggaccactacagctattttttacggtatcacccgataccgctgggacttatacaattgctgaacaatctggtgtactaccgcatcacgtaatcgaagaagccaacatgcctcttttaccaaaccgtgctgatcggaagcgcatcgccaacaaccacccaatgcagtgcgccttattttttgacagaatcatgactattataattgatgtttttcttgggtgggatcgaaaggcacatcaacccaagaaaggagggggaattttcggtgtggttcgagcatttggggctgccgcagaaacacaacagggtggtgatctccatgcccacttcatggtatggttacacggatttcctaccacgtcacagcaaatgaaagaagccataccgtgcaggttcggacggctcggacattcggacaacctttaaaactaaatgctattaaatgctccgtgaagtgtggtgcacataaaatctttcgcaatcctctgtcatacagcggctgtttagtggacaacggcttggggactgcgccaacagcagcagctgcagcagcagcaagacgtgcgggatgtcggcgccgtgcgggacggcgggtcgttcctcgggcggggtggcagccgtcgaggccagcagcagcagcgggctgaggaggacgaggaggtggtggaggtggcggccaacagcggagtcgacgacatgagagggatgcctacggcggacacctactgtgacactcacttcatgtaagtagataacgagatggctgaatgaatcgatgtatgatgtaactatgtgttgggacctaacactggatcgcgactacaattacgttgtgctgtgattgttgtagggctcaagaacatgcactggtgcatcttcaagagccttgccctcctgctgaagtcgctggtgattcctgatgcggtcgtcgagcttgccttgagcatacatccgcttcaaaaccttaacaattgtgccatgcgactttgctttcacgttctcagcctccaggaaagcaagaacgtttgcctcggcctcccgtcctgagctcaggatgcgtccctttgctgtgacctcatctccggtcacgctgtatccggctgggagaaaaacccgcatacaggccacggccaccttgcactcgtgatagcgccgccggtttggacgcgcgcttggcaacgggggcagaaaccactcgtaccacacagtcgcgagtggctttgcacgcgaatgcgcacgagttgccgcgccgcttgcagtatccgacaaagcgctggacgagctcgacaggctatcagctgctgttgtcgacggagcggtggttacgtccgatgggtgctcaagccgctgctcccgctggttcaatgccttcacttcggctgctagccctccaaggatctgcgcctgctgcttcaagagcaaggtttgcctccgcaagagttcgtcgtcttcaacacgccgtggtgccggactgcgtggagtgtcgttcttggacggctgtaaggtacgatgaatagccattgaccatgcagcaatctcagcctgtgccgcctgtacctgacttagtacttcttgaacccgttcgatgtacagtgactctggcctaagccgaagcatgtcggggtagtggagaatggcggtggcggtaagtacgtccactacatcatctcgcaagctgagtctctccgtgaaccccttcgcagccgagaaaagccggtcttgaacttggcgaattcgatgcagaaccagaggatcgaagtcgtccagtgtaggtagccgcggactagcttttaaatcccatccagctaacgacttgccgacggtttgatcttcctgcgtcgtgccaacaatataattgaacgctttgctcacagcactcatgctccagcctccacggtctagaatccaaggtgtgctgattttgctgtcactattcgcgttttgagcagctccacgccgaaatgaatgcgatgataaccctggcgtcaggttagtaccttcggtttggcagacaccactccacttctgcagtacgcgattatcatacgcgtgaattccggggactgtcgcttttttcgcaggtgcttttggggtcggcgactcagagttggaggttgctggggacctggtacgcgcatcaagtagttcgcggagcggcgtttcgccaatttcagtcggcaggagctcttgtgtatcccgaggaagttgatccatgagaaactcgcttggggtcgactgcataattgcagccaaagctagtgcgtgaattggtcaagacgaaaatcgtttgggtcgtgaaaaatcgacgctccttgatacgaggcagacttcatgcgcttaaaggtgataaatagacacccacctgtgtaccacgattaaaaatacacaaggtcaaaaccaaattaggaaaaataaaaagacaagtacttaccagggtaaacagcgacctgttttttcacgagacacatagtgtctgaagaccgacccagcaaataccaaagaatgttgagaagggctggatcctggtagtcctgcacagatacagcccccttcaatatcgctaaggtgagcgagcgcaggtcgcttttcgtgcacggtggggcctggtgcgtaaaatatgtgcctcgcttggagcagtacttgtcgaggattgacgcaatcttttgcagccgacgacccgatacagcacttaaagctggaaacagctcgagtaggtggttcttgacgttgccaaagtagctggcgaccgagttcttggatagcagcgagcccttcgagctttctttaaatgctaaatacactgcaaatttgtcgagaacaatgtagagagtatcgccagttgaatccccacctacaaactcatagatggcgttgacggtgaagccctcggcgaccgcgaagcgctcgaaggcgttgagagccgtcgagcgagcccgctgggagttcccaggtatgagcgctttcgtcgacatgagtcgtttcttgagtggttatgctgcctcgtctatctggcgcacccaaaattaatatgtgtccgaatattgacgatattttcagaatatttgacttactgactttaactatagaaatatcaaatatttttcagatgttcggacaaaatatgtccgaattgtccgatttgttacttacggcacagcatgagatttgaggcacgccgattggctcacaaaatatgagaaagtcttctgataggccaagcgcttgtccgaacggacacgatattctaccatatcttcgaacgcagcattcacacagcgtctaaccgattatgttgattgcatttcaacaacaactatctcagtggttgaatcaccaaatcgttgcttcaatgagggcgctggagaattgaaaccagttgcggtcggtatcgatggataccggaagccattgccaggacaacatgcaccgattacttcttgttgtcagatttgtaatgtcaattatagagacaaagatgtgattaatgctgcgattgatattgctgcgcgtcgcaatgcagtaaagttatcacctgaaaacattgattttattagatgctccccaccgcgtaataatgataatagctcattgtcggcactagaattaagcctcatcgtccgcgatgtacaagttcactattggagccacgcaaattcttgctttaagcctacgcgcagaacaccgaaagcatctgtctgccgtttctttaagccgcatgaacctagactagaaaacacttgcatcgacgacgggaacgatttgcagttgagccggccgattggatcagagtacgtaaatgcatacaatcgaacgctaatgcaaacgctaaaatgtgaccacgacgtgcagcttgtgcttggagccagcgctaaaaacgcagcagcatacatttgcaagtattgcatgaaaaagcaaaatcccatcgaaaacgaagttcgcttttcagttggtgtattcaacaaagctgtggaaaaagcagatcggtcaacccatcacactgcagagcggagagggtacaaattgctctcatctatgctatatgcgctgacgaacggccaagaagttgcagcaccaatgaccgctttatatattcatcgcggtagtccatattggttctcacatgagcatacgtatgtgaacctcgaaaagatgctacagagtacaaattcaccgacagttgaaattacgatccccgaagatattaactcggattcaaacgggcccgtatcgaatggtaaacgcaagctaagtatgtactggaaacgacaaaaagagttagataacgtcaattttatcactatttgtgaatggtaccacagcggaaagaaacaagacgccgatggggcgctacactttgaaaaaaatgcacatcggcaacttttcatcatgtcaggaaagcaattgccagatcttaacgctaacacatctgatactgacagaaagttttagtatttggtgcttttgacactttttaaaccacatcgagaaggtagaattgttgaagggtatccaaacgctgaacgcgcttacattgggtttaaatccacgtgctcagctcctgaacaaactcaactgagggaattcgaagagaagtggatagattattacaggtctggagctatagaaaaagaagagcaaggatcacaagaagacattctgcttcgcacaaaatctccttcgagagctccatggcagccctacgatcgagaaacagaaatagacaatgacaacttttccgatgcggcaagtggcgacggcgataatagcgacaacgagttagaaacatacatggatcaattaatcagcgaaatattgtacacgtgtcctattgatgcagttcagaatttgcgctccacaatcaacaacacatgcgataattactcacaaccagcagaggcttttgtacccgcttacacatcattcgaagactacaccgaacacgtcacttcatacaacagtgacaataacacatcaacaggaactagcgatttcattgcagcttttcctgaagccaagacaagattagaaagactccaggactgcttcgaagcagttccctgggggcctgatcaagccacagccacttcgataagttctatacctgccttccctagcattgaaacggtctcaaaggcctttaacttcaacttttggcagcacgcgatatttgaaattgcagcgaggcatctcctatttgcatacttgtcagatatcaaagatgctttacaagaaccattatttccagaagattttgtcttgcagccctatgctatcaaagaacagcttatagcgtacgtcggaggagaagctggtactggtaaatcacgagtaattctcgcactactactatttgccgagaagtggggtcgagaaggaagcgttgaaacccttgcctttacaggagtggcggcaatgaatataaaaggcagaacaatacacttcgcacgcaaccttcagctaaacggtacacaatccaactctcctcccagtttgcaaatgaaaaatgcttttcaaaaggtggtattagttataatggacgaaatatctatgacagatcacgggttactaggttccgctgacatgacatcacgagcaatgtccgatcaaccccacaaaataatgggcggaaagcatgccatgtactttggtgactggttacagttaccacctgtacgtggaacaccatgtaagttctaaccagtttcttattagtatcttcgtttgctaattggcaattcatattattcccatggtcgcaggctttaaacctccacctctagcagcaagcaccgctaggaatgttgagtttgaagtctacaactccatcaactttgtcatctttctcaccgaaaatatgcgtgccaaaatcgacccaatctacgcagaaattttgagtgaacttcgatggggtagactatcagacgctcaccgaaaattattaaactccagagtatttacagacgcgcgacgttcagtgagtaaagctggtcgttctccggattcctattacaatcctgttcttgtcgccactaatgcactacgatgtgcaattaatgacacaatgacaatccaagcatgtacaaagactaacactacgatatacgaaatctcggcaaagccgacacctcgatcaaaggcaatcttcaacaaaatagttaacgcaaacgacgatgaaactgaccgaattccaatgaaattaatctgcttcattggtatgccagtaatgattacaagaaaacaccccgctctaaaagatgcaaacgttattgctaatggaacaaccggaatcatagtaggtttcgcgcctccactacaagaatctgcatgccgtaataaactagttcatggcactatcgtaaaagaggtgcttaacccccccgacctaattatcattcgcgttcacgactgcgaaagcacattggtagatggatatcctccgggaactatcggaataccagttcttaacgcacagattaagctgtcaaaattcaagaatctagctcgttcatcgatttcagttcgtcaatttgcaatagtgtcagccttctcctgcacagctgaaaaactacaagggaaaacctgcaaggatggcgttacggtaacgcccttagaaagaccaggaatgccacatcaaactctctatgttgcactatcacgaacgacatcactgcaaattctaacacttaccgaagatatcacaccagaatgcatgcagcagttccaacctcctcctacgtatgtagccgaaatgctacgactccaagctctcatagatgtgccaccatatattccttctgaagagctcttaaaattcagtatctggctggagaaaaacaacatacatacagcaacttgaaaaaatagagaatataaaaagtggatccactcgatcccgatctggaaagcgtaccagcgttgaactcggcgtctttgctgttgtgaggggccgctacttatctgccatggatgtctgccgcgcgcaggctccaagatttgccataatgatcaccacctgcccccaagcttcggaacatacccaccaagcctccgagtccactccgacccaaaagacatccaagaggccttcggggtcagtcacggggtcattttagccgccagcgcgttcggggacgacgtccacaacctgccaagcaaccagcggacgggtagattcagtgcgagcagaacgtggcgagtcgagatgtccacgtttatcatggacgcgatggagacccggtggtccgctgatgttcgctggcgtggcgcatttcatgttggggttattctgccctaattgccagctcaaaaggcacggcctcaagcctgctgtcagctttccgaccgaaaccacgatgactcctgagcaagctggagaaagttaccgactctcatcgctcatgtaccagtgcatcgggctcagtttgagcgccgacaggtctagcaacatgcagttgtatcggtaaagctggtgttggtccgcagcggaaagttatcgcccacatgcagtaggttgttttctccgcgcctaccattcagcaacagcaattgaaatagtgatgctacggtaacaaatccggagtaataatgaatcaccttgtattatcgtgctttgcatccagtatttagtgcactagttagtgttcgtatttagtggtaaatcatagaggctttgaaggcaagttgctcaagtcgtgtttcaagctggtttagctccgaaatgacactttctaggagtgccaaaaggatgctaatccgtactggatgtgctagatcatgcaggagatggtgtttccgcactacttagtgctgattaaccatccacgacttacagcaattcatacctgagtacgatttatagataagtcgtgctcgataagtcgtacagttacaggccaaactcgcgaagaagtctcgttggatgacattatactgggttgcaacaactcacgcaccatggagtactgtagaccttgacagtttttcttcctgatcgtggggcgagcaaaaaaagatagtaacagaaatagcgataacaatatcagtttcaaagtcagtaactaatagcggttgcagtagcggtggcattgacagtagggcagttgcagtggtagctggcagtgatcgtgacgcaggcgaacaatttcaatagcaatataccgaataagaattattgtgcctttcacttattctgccgtgataattctggcataactctaatccgttatcgaccttaattatgccccgagttagctaattcccatgttaattccgggtcgtccctccgtggccgaattaggaacggcgatggtgaggccgacttcgttaggcggaaacagagcgattggcggtttcctatccgccaatccatgccattctgctcgtatctccgtcgattagctctcaaatgctgatcgcggatgttaggagaagcgcccacaatcttaggcagaattagcactaaataaacattgatcacccttttatgactctaattccgcctgaattaacagctcacccgctaaaatacgtgaaagacacaatacgtcatattgatactacttacgcagcaatacaagtcacacacattatttggaaaagaggagagtgatttacaagggtctagaggacgataagatcatcgataatgtttggatcgcgtcgttttcaccacggtgggcggcgatactcagatggcatctacttataagtttagtttgagcaagccatgaaatgccccgtgatattatgcagcaagtcaagcagtatggagtagattttggcagtctttctcaggcatgaaaaagaaagcaggagcaatatcattacagtgccattatcaatgctgagatcgtagttgtagcgtaaataacaacggtagcggtagtggcagcagataataaacagtcgcagtagcgatagcagcagatacgaacaagcaatatcaatgacaacattactatgacatcattaacagtagtgaaatagtagttgtagtagctgtagtacagcgttatagtggcaaaaaacgcaaaactgttcggtgcgtttgcctccgcttagagacccgcacgcgaagcgcgccccagttaaaagaaggcaaatatgctgagtattgtttgcaaacgaaacgctatatttccaatcactcacaaccaacgcgtttaaaacgtctctacttgaaatttgcatgccagtttctaaatgtgcacatcagacaatatttttagcagctttcagttctgtacaaaaatgcaggaaaatatctcccttcactaactggtgctgctccagcatggcttactagcattcctgttgtttcaggaagactgcctgcaatcagagcctttatgctgtttgatccagcactttgttaaaaaaacatttttctatgaagtttgagaaatgatttatgtaattcatttcgaaatacaagaaccaagtccactccgaatgatagatgctttgggctggactggtcgatatcaatcgtagcgagaaagcaaaacagatagaaacaatcgcttttcccgcattttccaaaatgctgtcaagactcgagctgcttccgccaccgctgctggcatactggagttcgctatctctcagttcgccctggacgtggagatgcgcggatacaagccgccgtatgacgacatgaagcaagttgcattggtctcgacaactttgttggcaacgcttcgagatttcgtgaaaagatttatagctgaaacgatggagttcgatcttcaagattcgacaacacccgcccaagttgcagctaaaatccaagacgtggctaccaagggatcggttatccgtgatttccgggtgcgaatggggcctgttcatgatttcttttacttcgaggcgccaatgccaagcgacttggagcagttggagattgactggaccacagtcttcgggtgtatgtctagcttaaggcgtctggatctggccagagtgccgctgtcgagccgccattttgagaatatactggaggctgcagcgacgaaatgcccccacgtagaattcctgagtctgccttgcgaaggagacattacgcactccgaaaatctcatggctttgtgcagtgcaatgaagacttggtgcgtcagaggacgacgtggagggctgaagcaactcacactgccctcatgcccgaagcaggagcacatgcccttccgcaacagcaagtgtctttttgatgcgctggctcaatattgtccaggaatcaagtttgtggtcaaacatcacctgatcaacttcttcgaggcagactattacgatgataaatgggcaatatcgttggagacgtggcgaaagttcaacgcatcttgcacggcattgacgcagtttcattggcaagttgtccctttcgctgactcattcttccgtgtatttggcgactaagtgaaacctcagctgaagacgttgacaatttggtcgaacccaacgtgggaatataagcgacatatgcgtgaactcgacggatcaaatgtaaacggagccagaagttgtccaggttatggcgtgttagctaccgacgttgcggcggtgatgaaagcttgccctgcgttaacactactatctatcgaaattcaccacctcggggattatcgcacagaagcgcggtacgaggatgtggaggtctatggagatgtttttttgggaatccgttgctcgtcactgcctcaatttggaaagaatttgggtgtctacctgccccgaccacgacgatacccacattatattcgtgaagacactcaccgatcgggcgttggcgcatctcggtcaactcccatatctggcagtgtgtgctttgcctcctggtcgtgtgactggtcgaggcatcttcgagtatattcggtctgtgtcgaagacggaggacgcaattgggaagaagcgcagcatttcgatcggcatcggtggcattaaccgccgagaagggaagataccatttttttactttgaactcgtggagttgctgaagctgctagcggaaacggacgaggaagcgcttggtgcggcattctgccgcccaaagccaaaggtggtggttgaccacccttacgaattctaccctggtcgggcttggctggatacgtacactcaaaatgaattggagccgctactgaagatagtgcaagagaagcacccgtcgctaaagcttgacgtggatacaggcgggacaattgacagaatcaagctgtgttggtgatgaatcctttgggctagaaactcgtaagagtgaaagacgatagcaatgactgtcgaaaatggctttcaagtttcgtatttcgtactaagcaataaatgaatacgtagtatgtgagtcaccatctaagtttgtgaatgatccaggtggacgagcacggcaccatcgtcgattatttatttatcggttcggatacgggtcagacctggtgttttggtcgggcatttcaggagggatgacgtaccttgggtaggacactttcgcgttggctctcgtctgcggacttcgacacggggggcccgccccctctctcgcttcgctcggggggcgccgctgcgcggcctgccccacccccttagtcgaagtcctcgactcgggcaggcgctgtgtctagaaaaaaaatatcgggtcgcagcgctcgcgttcgctcgctcgcgcagacacgccaccgcctgatcggcgggtgttggcaatgcgtgaatgcacttggtgagtctcgcgctcgcgctgctcgcccgtgatgtcgcccacccttgccaactagcagctggaagtggccaggaaacgtctttattgttgtatatatatatattgaaaaacctgaccggaaattcaggcccgacctgtatccgacctggtaaataatctaccccatcgtcctcgtccgtggccaccgagtggctcaagggcaagagcgtggacgagtgcctcaagatcaagaacacggacatcgcggcgcacctaaagctgcctcccgtcaagctgcactgcagcatgctggccgaggacgccatcaaggccgccatctcggactacaagcgcaagcagacggcctcgagctaagacggttctataggatagcaacagtcttgtcgccgccgaaatgagtgactgatacatcggcgcttcatgagggcgagcttggcccccgtggacggaagacaggtcaaagtcgaaaagcatacagtacttgctcaagctgttcaattactagtaacacagttgctaacttattgccctccgaagcattgttgtccttgacttcccacgtctctacgctttatctttccggtggtgagggatttcgcgtagatacgtcggagacggatgcttcttatcgtaatcaagcgagagtattcgactgattgaaatgtcaagccaagcattggactgattgatacttagacgcctccaccttctccatccaccgcaacaagcgacgcggcactcacagcgatggacaccaagatccggacggctctggatgagaaccttcgggctgtcagcaacgaggacgacgctgaaaaatgccggcctgtggttgttttcgagtcgataactcgtgcggagtttcgtgagtggctggacaaacatgaaggggagctgcgccggtggcagtacgagcctctgacggcggactccgggcgtgtcgtgatctacagttatccgacgaaggtgcacaacgtggcagcagggaggatcatccacgagatcctcgtccatgtcggcggcacccccgacaagcagaaggcatccttggcggcgctcaacatcctgatgtcgccgatgtgcgatgttggcgaccgcgaccaggagccggacggaggcttgaagccgaggggtgcccagcgttggagaggtgggcaccccacctctccaacgctgatcgtcgaagtcgcatacaagaacgagtcgtggggcggtctggtcctcaagttgaggcgctggatgagttgcagcaccgcagtccaagtggcgatcggcgtcaaggtatacaggactcgtcgccgcatcatcctcatacagcgcaacgctgataccatcgagatggactttgttgctggccaggaggagttcgtttcgttcccgcttcgggtcctgttccatggagatgcctgcgctgttggctgagcacgcgaacaacgtgatcgctgccaacctgggggagctgggcagtgtcatcgacgaggcgatttaaggcgataaatgcggacagtttggtgatgcgagctaaacatttgattcagaatcctcgtcgaatatctttcacttgatatgcaaatcgcgtcgttatcgttgaattccggttgtagacgaatgagtccgtctcaaccttgtagccgaagaaggtggagccgtgtacacgtagcgtatcatgttgtattttgtatggttatggacgcagctaattcatcggtgacatgcatctaagttgtagtttatttgagatccgtgagtccgtgctcttcaaagacgaccttcagctcggcaatgacccgcacaatctcggcgtgggccttgcgaagcggctcaatggcgtcgccttctccgacgtgcagctcccccagaatgtggctgcgcgtggggatcgagcccagagcagtgttgacgcccttgcggacaagccacgggtggcgcttgcccagagtctcctcgtaggctttgctggcgccgttgtagcagttctcctcggtcgactcgagcagcgtgagacgaacacacgcctccacgaactggatgaaccacagcagccgcaacaggcagcgtgaacacgaaggcttcttcttgccgcccacgtccgccacgcccaggtccacctcgtgttcgatcacggcccttacgctctgctccttccacgtgttagacgacgatggcaccggccacgcctccaagttgtggtcgatagatgtgaagtaagctccaacggtgctaccggcgaacgaagtagcacgaccgaagacgcccaggaagccgcagatgacgttgcacgtggccatgaagcggtcgaggcgcaactgaccatccggggcacgtgtcgcgacgccttcctccagagatgtgaccaacttgtccagcgtaaagccctcgtcgtggctctggtcgagcactgaaacttcgagatcatcttcctgcgacgtgtgaggcgacggaggagctgaggcctccacctcgcgcctcttgctggccacgctagtgtccgacagggatgacttcgttcggctcctctgctcaccagcggtggaactcacacggcgacgtcgacggcgacgctgctttgtcttcttcacggacttgttgctgcccttcggcctcgagagctcgtcgaacaccaccagtcccagcaaatacgtgcccagcgtccgcatcgagagcaaattgtccaatgcacgctccacgaaagagtatggctgcggggcgagtacagcaggagctgagtccgaagtcacgacacttccttcgacgccgcttctccgagtgtagtaaatcacgcgtaacgccacgagcactgccacagccagcagcgacacccaatgacgcgttctcagatgcgtgtagtaaaccactcgcgtgacctgagtcgaagatccccgcatcttggagattcctgcattaccggcggcactggtagttaccaccttctgcgcgggagaggcctgcttcacgccgccatttgcagcagccccaggcttctccttgccgtggatgagcgacgacagcgtcttggccggcacggagtgacgacgcgacaacccgttggtcgcgtcgccgtgcttgctcgtgaacgtgtcgtcgctgcgcatggccatcagcggcggcgacgcgtccgggaacgcgtcctctcccccgctgccgttgtcggcgttcatgacgctgcgcgcgcacgggtcgcagagcctcgagcccttcttccgctccaggcggcggtgcagcttcatgcggttcttgctgcagtcgtcgcagatcttctgcgcgcagagcttgcacgtgtgcttggcgcggaagaccgtaaaggaccgctcgcagatgctgcagcccttggccttggccgccgcgggctgcgacgggtcctgcaccacgtcgtcctcctcctcgtccgcgtcctcgtggttgagctccagcgggggcggcgccaccgtcttctccttctccttggccgccgccttctccttgctcgcggggctcttgcgcgcgcgcacgttcttgatctcgtccaccaccttctggcgcaggttgcggccgctgcggcctcctcctcctccgctggacgtgaacgccggcgacgagctcggcacgcgcatggcgtccgcggcaacggccggcgtcaaagatggagaagtgaccaccgccggcgggggcgccgcagccgtcgcacctgcctcgcccatcgtggaccgcgacgcgctgctgatctatgaccccgagggcgcgcaagtgcacacacttgccctgcagtgccgggaatgcggcgaatgcgcttctgcgtacgtttgtatgagcaaacgacgcatcgctctctctgcacaccggctctgtcacacgccaaaacgtaccggtatcagttgaccagttttgcgctcgctggattttttgcgtgcacacaaatttggtctggatacaaacgtcaagtgaaaaggaggagccgatccgaatttgcagataccatacggactatttcgggcaccaattgccaattggcaattggcaaggagatctaccggtagaccgggagatggcaaacatcatcgacggagaggctgttgcggttgtgtcgttttgctcagcttggaggtgactgcagtctcatcaaatgcagagtcgtcgactctggcaaaaaataaagcgtcacgaacagtgtggggcactttcgagcagaatcaaaattagcgtcaagactgcacactctgacacgccaagatggtgagtgctaaactggacaaaggcgagtggagtggtaagacgtcgagtgatctccatgcaaatcgctgcaagagccctaaaaataaaattcgacccatcaagtgatgatctactctgggggaaaccacagtcaagaaacgacctgcctgccactgctcctcgagctggtcgtcaatagacaagagcgcggaatacataagtcgtgagacgcaacctccggtagccaagatgatggacatgacgtccgatagtgcggtcgtgccggaagacacaatccagcgcaatctcgagtcgggacggcgatcacgcaccccacgcagcggacgagagccccggagtggcaatgatcatacgtgggccgacccagtcgcccctccacctcaagctcacatcgagcgcgttgaagatgccccgccagcaaacgcggtgggtacccccgagcgggttcaatctgctccaaagcaagggtccgtgcgtgcaatgatcaagcgaatgaccaggttgttccacccggatgacgatgatatggacccggcacagcgcaaggcgcactaccgtcgaggttcgatcctgattaagcatctggaggagaagcaggcgacgggcaaagcaacggagacggacatgaagttcttcgaggtggtcaagaagcggttcgatgcgaacttcatggagtcgcggacgattatctcgctctcggtgttccaaacggggtctaaccccatggacgacccgttcgcagtgattcacatgccggtggtgatccagcaggggttccgccgcaaactcttctcgatcttcacgctgcaactgcttgtagtcgtgattctgctcttgcttttctcgtacgttccagcgatccacagtgcgttcaaagacgccttcttcaactggcactacgtcttcatcatgtttgtggtcatggtgctggcgctgctgtggctgtacctggtcaagtaccgcttcccgctcaatttcatggttctcgctgtttataccgtcacgcagagcctcttcttcgccgcgttcgactgcttgtttgacacaaaggccagcatcttcatcttcacctttctattcggcatcatgggggtcaccactgtgctctccacgacgatcatcaagcggtcgttcgacccgaacatccaacccacgctcatcagctacccggtagtgctcctcatctccttcttcctcggcttcgtaacctcgctcttcatctacttcttctacatggtggatgtggtctcaccgctgcagtacagtgcgtcactggcggtcatgttgctcctcattatgtggttcgcctacgacgcttcttgcatgaacgagcggctctccccggacgaatacatgcaaggaatggtcttcttctacaccgacatggtgctcttcttgctcttcctgagtatcattttcgtggcatgtttcgcgtgtgagggtgactgtgcttgctacggaactgcagatattgttccgattggtcgaggtggtggagacgatgatgaaggaatggacgatgaagacggtgtcgagggtggcgaaggcgtggtggaagagtctcaataggaaggcacaaattatcaacagcagagtggtgaacggagcaatcggcagtccgatccttaatacgtagatcctttggacacaggcgttcttagtgcaactagggataagcaggttttcagcccccaagcttcctgccaagaaggtggacgaggaatggagcgaggatagcgtatgcaacggacgtagcggaggattatacgacctacgaggaaggtttaagttatcgtgcacttgagtgtcaactgtagctcgtttccggcaaaaggtaaacaaagcactagcacgcgaagctcatgcataatctacatgtatctatctacttgtttgcttgtttgtgtattttcttggtgaattatgaacgttgatcgctagggccaaccgcttctgtatgcttacatcagcttcatcttctgcacgctaccgagcaccatgaacgccgctgcaacaccgagccctgtcactaccaagccgacggcgagtgtgatccagccgatccaagcgcccgggtccgggaacgagtagctgccgatgtccgaggcccactgcggctcggcccagatcggcatcgacgagttcaccacgtcgtacagcagcggtgtcgtggtacgcgtgactcccggcgagctggcttcgtgatggtacgcgctcttgtcggcacagacaccaggatacacgcactccatgcccttaccaccgtcgccgcatccttgactctgtgagcacgtggcagcagcatcagccgtagcattcggcaccatggcagacgcaaggaacgcgcgcgtgaagaactcgtaggcgttcgggaaaaggcgcacggcgtagtcgtcatccgaccaggactcgttgaacagtgacgagtatgagccatcactcttcttcagcacaagcgtagaccggtcggcgtcaagcgggccggggtacaaggtagccggcacagagtacgacggccacgccgagtccgtcagactcagatactcgatcagcgtcgttaccatgtactgcgagtagttcttcatgaggtcgcaattccagtccatcgagatgcacgacagcatcgactccaccagccacgtatccacctcgatcttgttcatctgtgcggtggtagcgttgctcgaagcaagcgtgaacacactctccgcaagaatctgagcagcctgcacaactgcatccacatccaggacagtaaattcatcatgacggctgttgtacgtcctcttggacgtgtagctctcgtcgtaacctgcaagcaccgcacccacaaggtcccgttgaccatattcagcaccattcacaaaagaggtcagcggcgtaggcgggagcgatccagtgctgccttctccaacagcggaagcagccgacggcgcactcaaaacggcatcaaccagatcgctcgtgtcgttcgcgtgagggttgacatgcagcgtcaagttgcccgacttcgggagaatgccgacctggtccacagcaatcgcgtacgagatgttggccagcttcacgtttgcaaactccgtgctactcagcatcggagaggtgcagaagctctcgcccatgggtgatgatgaatcgtccacgggatacttgcacgctgtttccgggtccttcgtgaatttctgcaggtccgagagaaacttgcgagatcccacaaagccaaacttttcggcctggaacgctgcgaacaccactttcttatcgaacgccgagtccggcagtcccttgagagcatgagccgctgccagcaacgccacaactccagacgcccccgtgttagctccgggcgccagcacatgggacaccgacgtggcgtccatgcccgccatggccatgacgatctcgcccgatttcaagtttcccctcatggcccaggagctctgacctccgatggggtcgcacttggggctgcggttgccgtagatgttggtgaagttgaggcacttgagcgagttcatctcctcggggccgaagtagtagttcatgaagcccttgtacgtggcccctgccccgttcttgaggttgatctcggctcgcttggtgaactcggcgcccgtcgaggcgttctgcagcatcacgacggggaacggcagcgactcggtcagcaggccgttgcccgtcgggttccacttggtcttgtcactggcaaatgggttcaaagcgccgtccacggtgccgtctccctgcggcgtggcggcgtcgaaggagccgttgttgctaccagtctccgggtacacgaagaggcccccgatgcggtcgatgcccgaggagatggcgtcgtagctcagcagcgactcggccatgaccagcacgtacttggatgccgcgtcctgctgctgcgcctggccggccacgaagctctgcagctcgtccgcgctcgatattgggtacagcggcgccatgtcggcggccgagaggctgcggcagcccacgctgcccccggagtggaacaggcgcacgcactcgccgcccgtggtaaccaggtgctcgggcgcgcccgcggtcacggacgccgcgtccgcagacgcgagcagcagcgcggcgggcagcagcgacgacaaggcggggaggcgcattgcggctgatcccaagttttgagtgcaggaatgcggaaactggctgaaacctaggctttcgactagggtatgctttagacaaggtcctctggaatgttatccgtttttatcggtatctaccggtgatgtgatacaaaagtgaaaggcttagacctgacagtatcttttttatagtctggactataatagggcacattagccgaaatggcgcggcgcgagctgaatgtgcgcgagctgctggagctggagcgccagatctaccaggagagcatcgaccgcgtgcttcagcaacaggagcagctgcattccggcgagcacgagggctttgtgcgccgctgcaggccgttcgaggccgaccgggagcgcgagctgcaggtggcgcaggcccagtaccagttctcgctcagtgacgcgttgagtttgcgggacttcgacctgcagcaggccgacgacgtgttccgcgctgagcggctgcaacttaagcggaagctgctggagagggtgcggcgacggcgactgagggtcgagaagcggctgaaggcgctggacgagaagcccaccaacgtcaccagcaactcaaagaggacaaaagttggagctattgttgctgcgtccaggctggagggacagctgcagccacaggagctggagacgcagctacgacgagcgcagcggcgcaccaggaagagcttcaacttccgacatttggccggtggagtgctgcccacgccgcagcggattgtggaggatgtcgtgaaggaatgtcaaaagttgcagcgcaatcgagagcagcaagaagcggcgacaatggcggcggaggaaggggcagcaacgcaaatgcaggtggcagttggtgaagatggacagaagatcgtgtgtcgaggtggaaatggacaagagacgttcgctgtgggggacgcagtggtgctcatctcgcagttaacggaggaggatttccacggattcgtgtcggttatcacgcctgaagaggtgaaactggtgctggtgtgtgggtcccacgtacgtgtgacgcttactcggctacgcagtggacagtgtacgcttgagaggcaggcaattggaaaaccggaaaagaggcgaggagatatttatgcgaatggatcgacgccaggcgctactagcctggaagcgctgatacgtgatcccccagacgtccgtcgccgtgccgccgccgttatgagtacttatcctattcaagtgtgtttagttgcaagctggaagctaatattttgttgcgtttgcatgctcagaccgactcaagcgaaagacaacgatcgatattcgacgtggcttctgaaaatcgtgtttaagagccttatctgcgtgccattaagggatcgctcgtcagatagcaagatagcactactgtccctcttcttcgcgttgaatcacctcatcgatgacactgcccagctcccccaggttgacagcgatcacgttgttcgcctcggcttcaagcctccgtcacatcggcgacatcaggatgttgagcgccgccaaggatgccttctgcttgtcgggggtgccgccgacatggacgaggatctcgtggatgatcctccctgctgccacgttgtatagaacaatattcaaaaatattaattaattctaataaaattatcaaaaatcactcaaaatcattatgcccgtcatgtttgtccagccactcacgaaactccgcacgagttatcgactcgaaaacaaccacaggccggcatttttcagcgtcgtcctcgttgctgacagcccgaaggttctcagggttccccacgcggcacctctccaacgctgatcgtcgaagtcgcaacgcctccaccttctccatccaccgcaacaagcgacgcggcactcacagcgatggaccggacggctctggaatgctcagccaacagcgcgggtatcgccgccacaccatggaacagggcccgaagcgggaacgaaacgaactccccctggccagcaacgaagtccatctcgatggtatcagcgttgcgctgcatgaggatgatgcggcgacgagtcctgtataccttgacgccgatcgccacttggactgcggtgctggaactcattcagcgcttcaacttgaggaccaggccgtcccacgactaagtatcaatcagtccaatgcttggcttgacatttcaatcagtcgaatactctcgcttgattacgataagaagcatccgtctccgacgtatctacgcgaaatccctcaccaccggaaagataaagcgtagagacgtgggaagtcaaggacaacaatgcttcggagggcaataagtttgcaactgtgttactagtaattgaacagcttgagcaagtactgtatgcttttcgactttgacctgtcttccgtccacgggggccaagctcgccctcatgaagcgccgatgtatcagtcactcatttcggcggcgacaagactgttgctatcctatagaaccgtcttagctcgaggccgtctgcttgcgcttgtagtccgagatggcggccttgatggcgtcctcggccagcatgctgcagtgcagcttgacgggcggcagctttaggtgcgccgcgatgtccgtgttcttgatcttgaggcactcgtccacgctcctgcccttgagccactcggtggccacggacgaggacgcgatggccgaaccgcagccgaacgtcttgaacttcgagtccacgatggtgccgtgctcgtccacctggatctgcagcttcatgacgtcgccgcaggcgggcgcgcccacgaggcccgtgcccacgtccttggcgctcttgtccatggcgcccacgttgcgcgggttctcgtagtggtcgatgacgttctcgtggtacaggcgcgtctgctgcacgaaggcgggggacgtgccgttgcgcgcggcggcggagaagcgcttgagggccgagcgagcgagcatcgtggggctgttgaaggctgaaagcggagtgacctcctggagcggcaccactacactgttgggctgtttcgtgcaccagtttcggtagggttattcaagagttttaatcgtacttagcagagaaacgtaatgtttgtctctatgggctatcccccggttcgctacgtagctggagatggagacgaaaaccaaaagtgtgaccggattggtcaaaagtaggtagcacacaacaagacaactagagatggcactgtgaattcgtctccagctctttgaggtggagaggggcggatctacctagagatttacagggccaggcacaacatgggagacgaagatgcaattgtcctcgctgtggctttgtatgcagacagttgtgaaccaggatctcctgctggcaagaagaactgttttaccgtcaccactctgcgcttcgagtcgatgcttcaatcatcagcctattcaagctggttcgagaccaatctgcgctgtacgagatccaccttcttccgtatagctagctttctacaagagcatggggtcgcttttgcgcaagctaaggtcaagaagcattcctacgaaaagaaggtggcagcggcgctgtatttcctgggctcagcgggtggatatcgcgaggtgggagctgcaatgggcatggctagaagctacgtcatggagatcactacggaggtagacgttagaagctcctttcagacgagacttgcctcggccctgtgctgcttgcggtgcggccgaggcttgcagacgctcgagcatgcgagatggagcgggagtaggctctggcgtagcagacatcgccactgatacttgaggtagcggaacaaatgtggacgcagtctcggcgccttctagcagcagaccttcatcaccggcaaatggtgtcagcgagacgaggggctcggacgctggcgtttcgtcatgacgtgcggggggcgcaggaaccgaagagccttgagcagcggcatgtgccgcacgcgtggccgcactggtgaggagtcggcattttctcaagtggggaggagagccataccatatctgtcctgtgattggcttaaaatttgtctggagatggatacatagcgaacgagctgtaggtggagatcaagcaccatctccatctcaagtacaacgcgaacaggctctaataaagggctgatgaatttgcacgaaagtactttcgtgcactttcgagcactgcacgaaacagccctagacaccacgtccgaccgttggtgtggcgcacacattattccgaggactggccaatgggaagagagcgatcagatggcgagcttcaactgcttcaactttggcctggtttaacagggctccaccgaaagcaggccctgctgtcggacgcatgctcagcaatggttgtacctatagctgagctcgcagcaattaatagtgtaagagccacgaagcaggtggtctcttgtgattgcaaggtgagctgctggtcaagtcgcaagtcgctctcggtgcgtgaggacgattaagtgctggaaatggtactggtacgatcggcaatgcggtgcacttgcagagctccgtaagaccacataacgtactctacaatacatggactagaaaatcgccacgttaacttactgtagcattcaatttctgcttggagggcaactctaaccgtcaaaacttcagaaatggaatggacggtacgtaccggaaacctcagattccgtggtgctctcaactttagagaccaaaagcatattagagcacgaactcccagcttgcgcgtatgttccacctgccaggcgcatgcggataaggcgtatggctggattgcagccatgcgaatggagtctagccttggacagcctggacaccctatacatgtaaaccgttctcgcataaaatgccaagtacgtatcacgattgggtgttatgcgctagcttttactttgtgtgaagcaagctgtcgagtatcctacatgaacactgccaatttatccggcaaattttcaactcaaagatgagttttcatcgaagcacgtatgtatcctataggcaaaaccgcttcattcataagctacatgtagcttggtcgccactgcgcattccttttcgtattcttgctccgctccgtaggcgacattaaaacgggcaagtcgaggcgggtccgtgtctgcagcgccctccgtacatggctccacatatcaggacacgtgccagttgacgtgcacctccgccaagactgaagcagttccgcgcgtccagcaatactgaagttcgtgggcattggcacaccgcaatgagtgcagcttctacacccgttgaagtccttcctgcttggatttctctccaccttctcaccgtggtgcggtgcctcagtggttcagccacaccgtacgtcgagcaaggcagggctcgttcatcacatcgaacggcagcggcggactgcaaggcgcccaacagtttggcgagtcaaaggcgtgactcaaaggcaaagttgcaccgaatcacgaagggcggcacaatacaaaagtcccgctcgtttaatcaaatcggataggtcgggtgtatcagatatagcaattttgtttcaacagtaagccactaacattccttcccaatacaattttatgtacccaaatgatttcaacagggcttaagattatagacgtttccgatataccggctggcgctctttctggtttcagtcgcacgtcgagccgctcgactcgagcgtggcccacatggcaggtcacgtgcatggcgtccaccgaggagctcacgaacaatgcgccagttggcaactttgggcggagactccccactccattctacgcacgccctcgtcgaggcgagagacaggaaagtccgcgggaagagcgaaaaggcctgccagcagcacaacgtcaagagctgcgaagccgctttgtagctcgccttcatctctctggtctgagcctccttggctggtcttggcagtcgagaacattcgtccgtgggcaggaagcgagcagtgttgcggatgtgcgtgtacttggcgccgcgatggcggcgacggtcgctgctggcgacgctgatgttggcacttacgttgctgctgacggcggacgccgcccgggcgctgcgtactagcagtgtcgagacgcagcatcaagcagggagcactacaggctccgggtccgctgcagtgaacgaggtccaggtcggtgatgtggacgcgggagtcgtcacgacggacacgacgcagagcagcaccacgttcaccaagaagacgtggggtgcaggcagccacagcgacgccagcaaaaagtccgtctccttttccagtttggtgcagacaacggcgaccgtggctccgtctggagagcggagtatcgaggagcccaagtcggcgtcgggctcgatggacaacgaagtcggaacaccgagcgcgaccaccaaagccaagggcacgacgagtgccaagcaggacgatgatgacagcgatgaatcatttgacctccagtcagatgacgacagtgccgatagcggctcggacagcgagaaccacgacaagactaccggcaagacaggtaccagcaacaagtcgacaccggcgccaacgccgacaccaaccccaacgccgacttcagcctcacagcagacgacgtaccctcctcaacctacgcatcctgggtctattgacgccaagacgctctcctggtcagagccgacgatgtacccccagactacccaaccggtgtctaacgttattgccaccaccacgccgtcgacagggtcctccgcctctggcagtgcgagtgggcaacccgtacagggtcagtcgtaccaggtatcaggctctgccaagagcgccgaggccttcgagaagagcaccaaatcggctgcgtcgacgactgacagcaggtctttggacgagacgctggtggtcgtcatcgtcggtgtcgtcggtgcaatcggcgcgttgctgatgttcgtgtctcgcaaggtcttgcaggaaaccggagacgacgaggacatggcggactccagcttcttctaagcaagggtggaggccctatctgtaaaaagttttactgcgtcggtagtgtgatttaaacggaggtaggagcaagctactgcagcctcgccgccaagcactaggcaaccaaagcgcaatgcagcagagggagcaacaagaagctatacatcaatatagacataacgcacgcgcccacgagcgcggttttctcttgttgatctgctcggcctcaacacctctaccagatcctaaaaggcttgagcggagcccattcttcctccctaactgatctacgccgtcttggccttggtcttggagtacgcgcggttgcgctgcgtgagcatgtggccgtacatgacggggaggccggggatgtacacgagcagcacgaggatgaccaccacgtagagcgagatggagatgttgtgcgtgttgggcagctggatggcgtacgcgcccgtggacaggaagctcaggctgctcaccatgcacaacacctcgcctatagaaacacatcacaacattgcacagcgtaacgtacttgcatagcacagcatagcaacggcaaatagccagccacggtggacagacgcacgtaccgagaacgcccgacgggtagagcaccatgaagaggtggtagcgcaggaagaagaggaagccgggcaccgcattgtacaggttgagcgcgtagaacgagtagcgcggcacctccacgagcccccagctggccaccatgagcgggaagccgaactggtagcgcgacacggggcacagcacgttgatggcccacacgagccataggcgcgagctcacctgcatgagcgtggagcccagcggcgagcgcacgaagcccacggcggcgtgcacgatctccatcacggccatggtctgcaccaccttgaggggcagcgacaccacgtcccacgtgctctgggccacctgactccagtcctggccagcctcatgcgcctgcagcaccgtggttacggtcaggtacagcacgtaggcccagccggcgcacgaggcgccgttgaaggccagcaggtacaggttgagcagcgcgttcttggccatcgtcgcgaatgatacactgacgatgacgcaggccaagatctgcggctgacacgcatggaccggtatgtggtgtgcgtcacactattctgcatcagcctcgtttgattggccacggaagggtgccggtaactaactggcatactttacgcaggatacttgacctggttaccgatcttcgaccgcgacggtattgacgttgacgcaatggcttcagagcatccaaggatcatgcaagacaccacagtatattcatgcagctcttggtgtgaggtgctcgttcacttgcaggcaaccaattgcctgcaagatcccgagcctagcaagccgcagcatctgaacgcagcgtatctagcgcggaaccgagcttgggcttgctctactgtccgccatcaggagtggcaacgcaaacggtagcgatctagttctcgccgagggccgtgtggatctgggccgtgacctggctcatgtccgtgtgggcgttgacgtccgccagcttaccctgcttgcggtagaagtcgatcacaggctgggtctgcttgtggaaggcctggagacgcgagccgagcgtggcctcgttgtcgtccttgcgctggatcaggggctcgcccgtgatgtcgtccttgccggccaccttaggcggggcgaacttgacgtggtagctgcggccgctggccgggtgcacgcggcggccggcaatgcgctccaccagcacctcgtccggcacgttgaagttgatgacggcgtccaccgacgtgttcacctcggcgagcatctcgtccagctgcatatcaaaggagcaagaggagcaaagcgtcagtccactggtgtctgccccgttattgcgaagcttgtctcattgcgcaccttcttggcctgcacgaccgtgcgcgggaagccgtcaaggatgaagccgcgacgacactcggggctcttgatggcgtccttgatgatgccgaccacgatctcgtcggtcacgagggcgcccgactccatggcggccttggccttcttgcccatctcggtgccggcggccacggcggcgcgcaggatgtcaccggtggccaggtggcacaggcagtactcgtccttcaccaggggtgactgcgtgcccttgccgcagccagggggtcctgtaacagaacaaaaggcggcgcgtcggtgccgagtccacaagatccgctcgctgtttaacgcggtattgctgcggttatgccgtaccgatgaagatggtgcggcgctccttcttgctggcgcactcaatgcgcttctgcagctccgcgagcagcgaggcggtggggacgccggcgagggtcatgatggcacaaggagaggacggtcgacactaacggggaggaatcggaactgacggcacagcggccacgtcgattcggttttgtaccggttttgagtagtagcttcgattaagtgcgactaagatctcccgtaattacgcgtgttttttacatgttgaagttgaccatcactccgctatacttgcggtttgtaaagtgaagacgtgtgaatgctcactgcctgcaacgacatgctgcgccttcaactattagcggcactggctcgaggcagccttacttcttctccttgccgaggcgcgcgtcgcgctgcgtggtcagctcctccacccaggactggaccagcggcgtgcggaacttgcccttggtgctctggaagaagtcgtccagagggacgttgtgggctgcaagcgtcagtcgcacaaaccagagtgagctacatcgactaacaagtaacatggtgttggagatgcttcgtagcaggtcacgcacctcgctcgtagtcgtccgcttggaggatcatctcgaacttgtcgaagtcctgcagagcagccgttcatcggtatgttagcaagctgcaagagcgatggacctgctctataagacaaggtgtaccttgacgatcttggcctcctcggtggatccagcctcgtactcgttccagagcgatcggatctcagcggcggacggggtgtcccccaaagtgttgcagatctcgtccagcgcctcctgtatcaccaaagtataagagatcgaagcaaacacaccgtcagccaaaccgttttccaagattgcatatcactacaaaccactacaacataccttttccatgcggtgcttgtcctcctcggcgactcctgctcggtagcaacacagggcgtatcaaacccagatccatcgtccaccccaataaccgcagcgacctaccgtcgtgaggtgtgatgtcacccaccagcgactccgccaagtcgtgcacaatggccatcttaatgcacctaacaaccgtaacacaagccaaacaacttagcactgccgcctcctccttactatgcaaacgaatggccagggatgaacgacagtctccgatcacgtacttggggcggttcacggtctcattggcgtcgtccagcagcatgcagcacatgctcatgcggtacatgtggtcggccacagactcgggcagcgccaccttgttgttcacccatccagtgcgcttgagcgtctgccagcaaagacaaatacgggttaacgttagcgttgctagacctcgaacacccgccgccacagaattttccagagcggttccttcacgcagcagatacaagagacataaagctatacagagacacattcaacgcactttgaggcggccgcatagtcgcaagaactcgatggcgctcagcgccttcgctcccgtcgccatgctacttctctgccatgaaagtatagttagttaggttttttgtgtaccacacaacgaatgtcgttagtcatttgacgttggttagggctacaattggtttttgtccaataatagcacacttgattagaaaaacctcgttgattttgaagcgagatttctcgcttatcaggcctttcgaggccttatcatgaagcttagaggcaggcgctaacgcctgatttttgctgcccattatctgtgagaactgaaggaggcacaacgctttttctgccagcaattttagtcctccgtagttttttttcgtaattctatcaaaaattagcgataattcatcgaaatttcaggatgcagatgtcgggtctcccgctgcaggtagcgaatcgaggattgatgtcatgagtgtcttccatcttgtcttgtccagtgctagttgtcgaagttcgtcaagatcgcgcgcgcagcgcagcgcagtcggtgtccggactgggtgtcatttatagaggtgtgactccgtccttttttctaaccgtaatttaccgacgagcactgctctgcaccttcctgacccccagctgctgaaaacgtcgacaccactgctaagtacagtagcaccaggtgcgaaagaggtctcatccacaactccgagcaccgcacacagcaacaatgggatcacgtacactccacgacaaaaagatatggacacctccaaaagtggctgtaacttcgtcattttttatcgttttaaagtgcggtttggactagagttgcagaacacgctggtaaagatctgcacgctgctaacacgcgcgcttttgcgcttcatcaggtagctcacatacaaatcactggttctgcccaggtgacaaaacttatggacagctaatccccatacaaaatcctatattaaccaaaaccccttacaaatgatacgaacttggactttgtatggggagacaaagcaacccatgatttctccactctacctggatcagctgtccataagttttgtcacctgggcagaaccagtgatttgtatgtgagctacctgatgaagcgcaaaagcgcgcgtgttagcagcgtgcagatctttaccagcgtgttctgcaactctagtccaaaccgcaccttaaaacgataaaaaatgacaaagttacagccacttttggtggtgtccatatctttttgtcgtggagggggatagcttagagccagcatcatttttagtcagaccatcagtttaatacattcggtactttttaatatgaactagagtatccaaaatatcatggtattaccggtataaagcagcgaagcgcgatcgatgattttaacggggttggaataaaacttaagcaaaaaatgcgcggtttaattcacacgcaacatactgtgcgaacttcggcgctgtgcgacgttggctaaacggagtgcgcacggcgcgacagtagtgtatgtagtgttctggacgtcgcatcatattgagctgcagtaggtacagaagaaacattcattgatagacggacaagccaccttcgtggccattctggtgcactttaaccctaaatgtgcccgattagatgggcgtgatgtttgctgcagcaagaacctaactagagcaatatgaacgcataacaaagcgaaattagcttcataactgcggtgacgtgtaaactgctcgttcgtaaatagagatatcttaacaggtgcggttcgcgaaaaagtctcgttggatgacatcatactgagttgcaacaactcacgcaccatggagtagaccttgacagtttttcttcctggtcgtggggcgagcagaaaaaagttaataacagaaatagcgataacaacatcagtagcaaagctattatttaatagcggttgcagtagcggtggcattgacagtagggcagttgcagtggtagcgggcagtgatcttgacgcaggcgaacaattccaatagcattttactgaataagaaatattaatacttcgtattgatattacttacgcagcaatgcaagtcacatatactatttagaaaaaaagagagtgatatacaaagcctagacgaccgataagaagttaagatcatcggtaatgcttgtggggacggcgatgttcagacggcatctacttgtaaatttagcttgcgccagccatgagatggccagcgatattatgcagcaatatataatagaaacatgaagtggattttggcagtctttctccggcgtgaagaagaaagcaggggaaatatcattgaaatgtcattatcatagctgatatcgtagttgtagcgcaaataacagcggtaacggcagtgccagcagtggcagcagataataaacagtcgcagtagcgatagcaggagatatgaactagcaacttcaatgacagcattactatgatatcattaacaatagtgaaatagtagttttagttgctgtagttgcagtagggataaacagtacttagtaacagtgaccagtagtaacgcccgccacagttagcaatatcaaaagcaatttctttaacaatagtggaatttcagtagtatagcaatagaagtagtaatggggtagcagtagcagtagcagtagtagtaacagtggcagtgtccagtagcagtgacagtagcagccgcagtagctggcagtggcggcgacagtggcagttgcaatcaataccaatagcaacatgatgttgttgtcaacatcaattataaccgtgtttgagaccaaccgccggatatgctcttatagcatctctagtatgagaattaaaatatctagtgcagtcatatgaagcgttacaggcatagtactcaccaaaatagtggtgataatggtaataacaataacaagtgcagacagcagatatctgctgaggcgcagtgtgtcctagccgtaaaaaacgcaaaattgttcggggcgtttgcctccgcttagagagttcattcgaaagaaaatcatgcccaggttttcttaccgcaatggatagttcaccctcaccgccatttctacgacaccattattgtgattggctgaaagcccgtgtgggtctaggtagcgaattccctccctccctttcctcattccagaatcggccgcctcgagaaaagatggtgaagctgttctgtgcgatcggtggcgtggcgggcagcgccttctcggtgcgtgtggacgagagtgactcggtggatgacttgaaggacgcgatcaaggcgaagaagccaaacaagttgaaggacatcgatgcaggtgacctgcagctcttcctggcgaagagggaggacggcgcgtggctgaagtcgaaggatctgctccggatgcggaagggggagatccccgatgaagttgagagtcactacatgaaggaggaattggacgatccaacggacaagatctgcgagaggtttcccacagtctccgacggaacgattcacgtgctggtgatgcttccggagcaagaacacgcacaaactgaattgtggcttgtcactggatccgttggcaacgcgctgaacacgaaagggattcgctgcaggctgtaccgactggcggggtcatgccttggatactacgatcccaaccttcgtgctggcgaaaccgacaaggcgctgtggtatgatgaggtgatgttgcggatccatgttcttttcaaagaaggtatgcattttggttattgtagaactgtgctggttgatgtctcacagatgttgtacagagagggatgctttgctatttgaaaacgaactgcagaccgaaggtatcaagcaaacttccccactcgatggccacacgatctcgacgactgtggccccagtttctcgggagttaagcgaactgcgacgcatctttgccatgcattatgttccagatgataccgagtcccctcaagtctcaatgacgactttctcgtccaacacctcgatcgttgacgtagcgactgacgaatttaagtaccagcgtatcgagagtgaagagtggttcgggtcggtggggaaggcacagagctgccatgtgatgtccagagagcattgcctgaaatatccaagctacaagaagtatgacaacgacccaagcaatcgtcttgctctttctgcagaaatgcacgagtggtttgatgctcggtcctatgcggtgccgacgatgaaaatttccgtcgagtccacatctgaaggatttgtaatcggcaacagatacaaggtacgagtagtttgagtacgtgctgaatactacttgttctaacattatttacgatgccataggtcgatttggttgtgcgcgcgtggaatgctggattcgcaagacttctctcgctgcgtttgaaagaaggctttgctgtgtcggatgatggcttggagatgcgaacatccatctacgtacagaacaagaaggtgttttgcgactgcatggagtggaagcgcaaagagatagagaagaagtggagagagcacgaggatatggcacctgctgtggattgactgcaccacgcgtaagatcctattgacttcaatttcaatttgcttttcatcctaataaatataaagttactaatatacaacgatggcggaccaactagccgagcgccgccgctacgcgttacgttaatgttttcgaccaatcgcaggtgttggcgccaccatttttggaccatttcgaacgaaaatgtggccgcgccggcagccggcgcaggcagctcctggtggggcttcaagcgctgcaacctcagctccagcagatcgtccattgtcctctcgagcaccaccatcttctgcgtcttcaggcacatctgcacctctttttgcgcctcgtaggagcgccgggaaggccccaaaccccactgtcaaagctcaaaagacctctagttcaggcacagacgacgctgcgtggctgctacgggctctagacaagaagaaaaagaagaaagtctaacctgatgcaagcaagaaggtcactaagccctcagagcccgaaaaagcggcgaaaaagacgcagccgaagccgaaaaatgagcgaaaaggaggtccactaggcctctccatgtctgtacaggagcgccagcaattgtggcgcagtggagcagctaagaagcctgaagatgaagcagcggaacgggccaagcagcaggagagagaacgtcaagagacgggctttgatcgtgtcttccaggaggtcttcggggagcagcagaaggacaagaaaggaggcgacgaggaggagctcaacagtgttttatccagtggagatacaggcgccaatgcgtcgtctttagggctgtcggtggttgatgcagagacagataaagacaaggaggtgacgaaggtgtcgggcaaacgtaaggctgctctgagtgatgacgagaaagaagaggaggcgtggggcttcgcgacggctgggaacagtgggttcactctcgatgacttcgacgctccatctgacagcaacgacgcgggttccggtgatgtgggtgatgctcggaaggctgcggagtttgagcgctggaaggccgaggacgcccaaagtgcggtgagcgacaacttcgtcaagctgaacatgcgtaagagattcaagggcagctctgggcgcgccaagaagcgaccggcgtatctgcgcgcacgtaatgagaacctgctggacgaagctacaggtgagaaatcttcaggcctcgctccggtggtcaatgcgaacggtactcaacagagtaagaaggagaagtcgatgctggctgacgacggcgtggacttcaccgaggagtgtctggaagcgctggccaaagccgagaaagcgcgtggtctctctagtcaagaaaaatcgaaaccgaagaaggaggccgagccattgacaccgccgaggtgtcatcatgcgttggtctgtcagaacttggaggtcaagaagaagaacaagaaccacggccgcaagttcttcgcctgcccgctgggattcgatgaaggtcgctgcgacttcttcctctgggaagacgaccacgtcccgcttgcactgcagacactcttcacggcttcttcttcctctgacggtgttgctgagtccgcagctgaagctgaagccattgagtgcgttcctctggatattgaagctactgaagaggagcaacgtgaggcgatgctcaccaatctgcttctggtgtttgggcacgccgactttcgtcctggccagcagtgggcgatctcaagggtgctgcgtcgtaaggacactctccttgtgttgcccacgggtgcaggcaagtcgctgtgctatcaattcccagcgctcttcttgcctggaattacgctcgtgatctcgccgcttatctcgctgatgaacgaccagtacgagagtctccccgccccattgaaggctcgctccttgtgtctttccggctccggctcggattcaggctcgtccaaggcgaagcatgcggcttttgtgcgtgatctgctggcggacaaactctctctgatcttcctgtcgccggagaaggcgctggatgctggaatgcaagcgctgctcgcgttatcgcgggtccgtgcgcgcttggcactagtgtgtgtcgacgaagcgcattgcgtctcagagtggtcccaccacttccgtccaagctacttgcggctggcagaggtcttccgccacacccagtgcgttttgtgtgtgactgccacagcctcgcgacgtgttgtccacgatgtattgcatcaattgcgctcacgtcggcagcttcagaatcaaggtggcgagagcgagagcgacatggtgctgcagatgccatggcaaaggaagaatctggcgctggaagttcgttccgtccggtcgaatgatgagcgactgcggcatctcgtccacatcctccccgagttgagcaaaggatcaacacagtcctccaaggctggcggtggaggtgttatcgtgtacgttcaccagcaacggcagacggaggaacttgcagctctgctgcgtgaacaattgcccaacgcttggcgcactgctggaaaggtggtggcgtttcatgctggcatggcgcctgaggcgaaggaaaaggtccgcacaggttttgcgcgaggcagagtgcgcgttgtggtggctactatcgcatttggtatgggcattgacaagaagaatgtgcgggctgttgtgcacttccacatgccgtcgtctgtcgagggatacgtgcagcagattggacgagcaggtcgtgacggcaagtctgcgcgagcgttgctgtatctgctgaatgaagacgcggtgcacttccgctcgttactgttttcaaccgcattacatcgcgaccagcttcggaggcttatggctcttgtcttccagagtcgggagagcttatccccagcgagcaagaagcatgtagtggctgtgaagtgctcgggaagaggtcagagagctggcagtgacctgacgctggagtctctcgagcgagattggctggagcgccaccttgacctgaaggcggcttcgatcgagacgttcctcacgttgctggccctcgagacgcagcgtcagaaggacgacgagctgggtttacgcgtggcactccaacctctgagcatgagtcaatgtacactgcagctgctggacactcaagcgaagaaactgggaccgcaatctacagtaagtcactgctcggagcggtgcagcgcaaggaattgcctaatgcacgcgtgacacatcgtaaggacgggtatctgagctcttgggttatcgactgccacctgcacgaagtagctcaatggtacggacggacgactggtgccaacagcaatggagaccaagctgcagccctgttagcagcttccgacgctcagcaggcgggtgaaaccaatgctgctgcggtcgctgccgccacgaatgagcgtcggctgctacaagaattgcgagcggctcaacagactggtcagatccagcgcttttcgctgtcacagcccgcattccagctgcagttgagctggagggctgaactgaccgacgagatgaagagtgaagtcgtggaccgatggacgaagctgttgtatgcgaagcacgggcatctcgagtcgcgccagcttgctcgtctcgctcatttgtatggagcgctgtacgcggcagctctaccggcgccttctccgacgtcaaccgcgcgtgatggcgaagatgaagaagacgaagaagatctggatgataaggcccatgctctcgagaccaaaccggtacgttacttcgaagacgacgacgataaggatgatgctgcagccggtggagacgacgtcgaaggtgacgaggatgagcgtttgctgcagaaaatgctgcggccgctgaccgagtctctgatcgaggctatcgagcgaggtacacgctcactcattcaactccgtcttggcggtggaggtccgcttgagggcagtgatactgaagagagcacgagcaacgatgaaggtatcaaatggacgagttacgctgtggccaaggtatttcacggattgacgacgccgcagcttccaactcggcagtggcgcgaccacgtctgctggcgacggtactctgacctggcattcgagcgcatcgtgcagattgcacacaaggtgatcctggaggaggaggctttggaatcgactgtaaagtcggcgagtgtgggcatgtcgacaacttaatggtactatggcctgttagattacttctctcctacttcatagtttcgccaagctggggaacgatggcggccacttccttcgatggcctggaactccagccgttcccaaccgtggcgctgtgcgtggtaattcacacaaactcacttcctaattcactgactagcttacgagtattttgcacgcagagtcttgcagacgcgactcaagcgcaggtcgggaagtgctggactggaagttgctggtgtgatcggtggcgacttaggagctgctctgctctgtgagtcgctggctcgggcgccttctgtgtgctaactgggcaggtggcgctcaaggttgcattagatttgactgcgttgtggatgcctgcgatctcgatgcgtctcgcccacgtctcagtcggtgagtgccgtgcgctttccagcatggcgaagtgactgccgctgtggtacagtttgcgctcgtgtgtttcgctttcgagcatagcgctccatgtcttcttgagcatctgcatctcctcgtcgtcgtccgagtcgtccgcgtaaatctccgcgcgctcttcctggcggccgaactcgcggtagaatcgccgcgtgaagtcgaagttgttgaagcgctgagtctcgtcgtcactgccgcctgcgtcctcctcgctgctggagctgaggtgatatctgctggtgcaggactgatacttgtggtccgtcaccgtcatcgcgaaggctggagttggtaccaacgggtagtggtggaatcccggagtcagcgaagcagcagccgacgtcctaactcgcaccgcggaaggcatcgccagacgccgacgtccgaccgcttcgccttcgtgttcaagcagttcccgccgcgaaaactgcttggctcacgctccaagcgcgtgattgaggcgcgatctctggcgctcaaccgcttcttgcagcatgctctggaggtcgtcgaagtcgttcgccagcgccaactcatcgccatttgcttcagcatgatgacccacatcgagacgttcctcgagtttggaagccaccgcgttgcagccccgcgcgtcgctccgtcacgaagtgtggactgcaacaacgtcaaacctgctcgacgaggagcgatgtcacccggcgcagctagggatactggtacaagtgctgacactggagctagcgctggcactcaagctgacgttggacctggtgttgaagctgctctcgatgttgtccatgtccgggctggtgaggtacgtggccatctcgtcgtcgatgagtgcgaggagcttctcgcgcagctcgcagaactcggagaagcagcgacggatgtgccggctcctctgcgtcttggtgtcttcaacccgctagatgtagaccgtgaacgccttgagcgccaaggccgacgtgatggtcgctgtcaatgagctcatggagccattcatggtggtcctgcctgtgtggtacgaggcgattgcaagagtgccgactggtgatcgcttgatccccccgtttcagcccccaactagacgaaggcgttggcgctgcggtttcgtgtggtccgtgtctcgctcgcctttcagctctacccgaaaccagttacgcgcgtttgctcgcttgattcgcagtctcagaacctgatgcttcttcacacgagcctcgggatgggggtcaaattgtctgccgggtagcgacgaggcacgcagaatggaaagtggtgaccgcgagttgaacactttcggcgacggcaggtggatagatagacttcgagggctcaggtggggccctctcacgggccggacgccgactgcactggaaggagcacgccggcatccctggaaacaaaccgagtggcccacggctcgtatctctagcgccgccgccgcatttgacagcaccaagatgttagctaactgcgggcgtctgtggatcaccgagctcacggtcgtcggggatcaagatgcaaagtttactgcgccgcagcaatggtaaactttgaaagggcgccctcttgagcattgcacaaccggcgcgcatttgagcctttcactcgtgcgcatgatcacaagtccagcgtaacggcagcaattattgagcagagtgagctgtgaccagtgctgctcgcccgaaggcaatgttttgacatcgagagcacatggtactcttccaagcaggaaaaggtggtgcgggtcaggccaggcgttcgtcgttagcgaggtggggccgaattgaagtgcgactatgatccaaccactgtcactgcgagcgagaggagcaactaacgttaggacaggcccgagcttccgttgggttttggcggtgcagagagcaattgttcctcgacgcgaaaattgaccccgggagggattgaatctcgcattgttctcgctagccacgcgcgtctcggtccagtcgtcgtggtcgattgcaaggctcgcctcggtggaggtgaagcttcggtgaacgcgcttccttctgtcgattcaacaaggatttggcacgaaatccggtttgatccactccttctacgagcccgagcccgtcaacttcaaaagtgggctccccctaatacgagagccaaaagtcgcacaaaatgggctccctcatggtaagtacgagatcaaggaattggctcccctccagggctccccaatacctagtatagcccttgcggattgcgttggtagttccttgtagctacaatagcggagtacagttgctctatatgctattattagttgaccgtgttcgctacgagcgtgtcgttaataaactactgtgcttggaagctcgatcctgggtctgtatgacccgacctcggccgaaataccgcagcaaccaaaacgtgtgtcagtacgtgtatgatgagacatgacgcgacgtgacgcccacgaccactacacctattgacaaacgttttcccaacgcatacaccttttgacgttttcccctagaagatcgagctcaaagatcaccacactagaagatctcgcgccgctcatatgtgtacagccgctccgaggcctccccagcgtcgccgatcgtccttccttcccctcaaggagaagccctttttcctatgccttttcaggttagaacctggagatacttcaatgacggccaatcatcagtgagatatttaacacaggtgaggggggagggctcacagttctggagggctcctttcacttaacctattgaactcaagagcccaggagcccgagctcgtaactttttgggttcacccaagagcccaggagcccggctctccccagggctcgtagaaggtgtggtttgatcgtagtgccaacgcgttttggcctgcgatctgaccaccgctgactctcgtaagtttcgatggaacacgtactccttctgctttaggctgtcgggcgagagcccaacgctgttgcaagcgggggtggggacatgcatgcactgtgcatggtactcagcgcaactttcatgacgtggtttcatggcaaatccattcacaaaatgaacggggccgggctgcatccaccgttcaagcacagcgctcatagcaggagagtatcaacttgatactgtcctgctcgctggagataagctcagctcgcgatcaagtcctcgcctatggtgtggacgtatcatacgtaagatgtacacacaacacgcgtctatcaagttgtgtttgtggcgagcagaagatggcgaacgggtgaagggctcactagaatatcatgcgcccaagcgcccttccaccaccctctagttgcacacattgtttcgtttatcaacatgaaaccgagaaaatggagcccttggctctcctgctggttgtagcgaagagctttctcaccagttgaggcttctgggatttctcactttgcaaacgggccgctcacaattgaactcaaccttcgtacagtttgtagctacgttgtacatgagatgagagagctacagtcctgattcagccgtagggttagaagttaccactggtaacggcgtatcatgatatcgaagtcaggggggctcggtgtagggattgctagcagtgctagcctagcacatcttcactaaattccgccaggcacgtttgctgctcaattctctgaaagcttttcagcggcgcaatagctgaagtcgatgatgattgctgttcacgatgctgagggtggcaactgcagtgtattcaatcctgtggcgatctgtctctccgaacgacgattgatgtttaaaacacgaactcccttcaagaggccccatgtaatgcaacaaaatgaagttgacgggcacgaatctgccaggtcgagaagagaaggagaagcacgagatggagagacagatcgttaagctcttctgtgggatcgtaggtgcgcgcggttcgttcccgatcgaaaataacgagatcaagaaggcgaggccgaacgcgtgcaggaacaccgacgccgaccaactgcggctttttgtacccaaggagggcggtgaatggcttacggaagcccaacttatggagggtctggatgcagatgtaaccagccgcatgaaggaacaacgctttgcgcaggagcccatcggcgcgatcgtcgcatcaagacaacgcagcaggctcacttctcgtagaaagacgttggagaaagttaagggcccgtagatatgctggtggttctggagagagcaactggtgggacgatcggttcggtggaaaagtgtaagagaaagctccatacgtggttccgcgatggccttgatgtacgcgacaagaagacgtccgatctgaatcccgggagtgattgaattgtccatttagatcaagcggtgaatccgaagtacgcactcgagacaccagatctcctttcggcgtataatacagcggtctttcacttaccaaacaaattgtggtgtggtaattccactaaaatcctcctctaccaaaatgtattagagacaccaacaacacgctaacccgcaaaggtaagcgcttattggatcaaaaccggaagaccaggaacgatcccttacaccgggtcggttgcaagcgcctctgtgcaccttaggttgtcttcggtcaacccaaaaacctgtaccactagtcacgagctaaggctaggatactacgcagcgcttccgcgcaaccccaccgcagtccctcagaaaggaagggtaccggcgtgttaggccttatacagggggaccaaggtaaaacctcggtaggtagactaatacactcagggatactctaatcccacaaatatataccgaacgatactctaataccgttcctgcctctccggctacgtcaactcttggcgctgccaaggaaactctcggtcaatgcacgataagctccccgacaggcatccacacgcagccgagcgtgtccaggcactacaataagctagctacacttgctgaagtcggacttgacccttgttggctttgggggaagactgtctttttattactgtgttttctgaggccctggtgcctcgttctggtcatcctatgatgagtcctatgtccctatacaaatatctagtgtgaacgatcgcaataaggcgattccggacacatcaaatgacgaccgcggctacactaataagtgcggccgaagtacgtaactaaatgcatctgtacctaaaagtgggtaccgtgaagccgcgttcggggttctattaggacccgacgaggcttcagccactgactgtcactccaccgaggataatgtcgtcatccaatcagaagcagtcatctccgtctctcgcttgacctcgccttgattgccccttgattgaacttgattgtcgggctggcgtgtcaacagcgttggaaactgccactttccaataccacaactacccccgcctcgacgcgagcctcccacgctggtgagcgtctaggcgtcctcagttcttcgactccatggctcctccgtcgcgtgcattcgccgacgcggctgccgctgctctttgggctctccagtgctccggacgtacgtttgtcgctcctgccgctcctcactgtaattcggatcctcgttgttgactccatccctttcttgatcatctcagggagctgttgatgtcgccaccgacacctcgggtcgtcgtccggcgcgccaggctcgttcggcgggtgcccccgcccctattgccgctggtgctgtgcctccagccccggccgcgcctgccggtgaccctacgctcattcctgccgcctccaggacctcggtcgacactccaccggctcctccaggtagtcctgagtctgccgctggggggaccgagactccctcgccggaagttcccatggaagaggctcccgactcgccgccgacaccgccgccaagccccagcactccaccgtcgccaactcccgcgccttcggtcacgttggcaactcgcggggcgtcggtgggggcgaggcagctgtaggaggtcgcgccggagctggtgcttatccggccgaggttcctccgacagcggttgtcttgggcgagcagcagatgctggagctcgctcgtctcgtcgtgggcgttgcccgtttacctccagctcgagtcaacgctgttctcgaccgcagcctgcaagccgccactaacgtcggtgaggtgttggctgctgccgttgctcctccgcgtctccctcttgcagaggctgatgaactggtggccctccgtcgcgagaacgaccggctgcaggctgagctctccgacaccaaagataaactcgctgaagagatgaatcttcggaccaagttggactacttcctcatctcggccaactccgagtgcgaccaagctctgtacctcgtccaggatatgcgcgtccagctcagcaacgccagcgctcagttgatgcaagcgaacggggtcatcgcccaccacgctgatgtcactcagtcgttggagaagcggacgctcgttgctgaggccgattcggccgctgctgtacgtcggaacacccagctccacgagcgtataagtgcaagcctcgttacctacaacactcagttggagaggcttcggaagcagttggcccaccgcgaccgagcgaacgtcatccccgcacgcattcaagcgttgacggacgagaacaacagcttgcggcgagcgaattctatccttcgtcggcactcggcagcacacggtctcgacgtcgacaccttggtctggcctcagccggcatcaccgccgcagagatcgattggaattttctcgggctgtccccaccgacggtcactgtcgagagtccatgccatgactaatcctcgtcagagttgggagaggagtccaagacaaccgacgtgccgatgactgagtctaccgaggctacgtccgctcccgctgcttcggtgggcacttctgctggttccccggtctccactgagtcgtcatcgcgcaagcggggtcggcaaaccgagtctgcttccgtcgggaatacggcatcccagcctcctcctcacaaacccttcggcagaccgtgagtcgacctgagggccagggctgcagcggccgccgcgccatctagtcctcgttcggcatcaggagagatttctccgcctcctcagtcgatggtgcgtccttcaacgacggctcgctcaagctggttggagtctcagcccctcccgtacgaacactcagacgtccccttgtatcctcggctggctagtcgctcctcgcttctctcgccgaccccagcccaacagtaggaatcgtctgacgtggagtttggagggggtatgagtcctagtgatgctccacaagatgaccttgagcctggcgagattccggagatgtcggccgatgctcagggtgttcaaggtcctattacggagccttccggtaccgtcatcgaggttccatccgagatttcgccttcggcggcgacttctattcctccgccggtctcgtctggtacagccggcgctggccgtgcccctcgagaatcggcggctggggtcaccaagggctttggcggctcaccagaccgttaacctaacggtgagtcgcctaatgagtccgagacctccgaggaccgtgacgcgttgttcctggagatgttcggccccgacaaaagagaggcaatctcggtggcgcaacctgtcgctccttcggaggctccttctcctctggctgctgagaccggggttcctgtagcttcacaagcggccaccgtgtcacccccgagtcgactccacactcggtcggcctctgttcacgctcggtcgatggtaacagcaacggtgacagcttcaccgagggatggacctgcctcgattgctccagccgtggttgacgcttctgacgtagctcctggatcacgtaagctcagtgggcttgccaccctgttcctggagccgggtttcacggcacccggggcgttggagtgctgacatcttatccaaaacgccagtgtccccctcgtcttcgaggacgacttggtcgcccccagttcagtggatgaaatcgtggagtttggcttggggacggatcccgctcaccccttccaagtgttgcgccagcttttcccagatgagtcttgtttgatcaacacgacgggtttcccatcctcggtggctatatcccgtcgtgcaactggtcgagctctactcgttcgcctatggcggcagttccggggtactcctaccactccaccgagaagggcgaccttggtttcgccttgtgggagcgacgccactggattaggggtaaagccgtcaaggcgtatatcgataacctcgccagaatcctcggtcagcgcaacgtgcaagtcctagcgcttcgacaagcgtggtccaagtaccaccgagagcgcagttatcgtgcagatcgcttgcgagaccagatgctccacaggatgtggaatgggaccattacgtacgacggacaacctccacagcaccgcaccgaggttttgctggagccgtcgtacttgcaatactcgttcgaggtgatggagtgggtccccactaccgacgactgggcccccgaggtggcggacgtggacgcccgcgagccgtggcgtaactgttggttccaagcgccggccgaccacccctacaacacggctttcgccccttgcaacgacgtcccgttgttcgtccccaacggatcgactggggagaccatggcgtcgtcggtcgtggttgaatcttctctgcggacttcgatggtggtcgctccatgggtggccgagttcgcaaacgcccgtcgttcttgctctccaagccccgatgaggagacgaaggagtcgggtgaagatttggcctcgttagaccccgcttcagcttcaccgtttcgtacacgttcttttccaatgtcgaccgaggttcgtggcgccttaggcgacactgcatgtgctatcccaatccaaaataatgtcatgttgtttgttccatttcgtcactcctgctcgcgttaacattctccacctccaatgcccggtcgcggctcccagagtctcatctcggtccttgagcgctgtggctgcgcctaacgatcggttcgtagccatgacactcccccgttctctgaccacttcgtcgttagcttaatactcacccgtcagcttgggaagcacaatcggatcccttccgtatgaagcgctgcttacgaagtttgggttgccctctcattagcttaatcgtcacttccttctcctgcaggggttccgaccaaggccccatttcgtcttctatcgtctttagctccatttcaaaatctccatccatcataggtccatatataagcgtaagtcgacgtctgacgcaccggtgcacacccctttaccgctcaataacggcgttcgaaacctcggtcacccctccttcagcttcgccatcactcgtttcatctactatggggttcaccgaggtttgttcgcgtcttcagctacccccacgtctccgttttgtcttgtttcgttcacattacatgcagcatgcaaattccagtagcattcttcgtctgtccttgcgagctggatagccctcgcaggcaggtcaatagtcgtctccagtagcctcgttcgtctgacatcgcgggctggattccccccgcgagcagttcaatcctcgttgaggcgcagaattactcctcgtcggccacttggaccatttgcaaacgtcggtcgcttcgtttccggcgcaggtaatcgtacaggaggccaccgcacgacagattggacgctggttcccatgtcggctcgtcatagccgacccacttcaccttgaactctcggacggcccggtgagtgctcgttgacaacggtgtccggtcatcgaggatagcctcgacttcatactcaccgtccaggtggtccggctcaaaactgtcttcaggcagtagttcctcgtcgaagtcaagacgagtgtcttcggtgaccccacgagccaaacgaaccctcggtcggccttcgaattcgtccactgacttgagtcgtgaaacatgcaccaccgggtagaactggtatccacttcggtcgggtaggtccaactcatacgcaaactcttcgaccttcttcttcacgcggaacggtccgtgccaccgatgggctcagtcctggtcgaacccgctccatgtacagccacactctgctcccaggctgcaaagcaagcctcgttctcgtcactgtagctccaccatggtcaggggaattcgatgctcggtcgaccgaggttctattctcgccgacgcctgccgtagctccttctccttccttccaagtgatgcattgtgctcttcagctctccgagccttttccgcggcttggtactccttggtcatcctcagggcgatttcctgctgtcggttgacctctcggcgccatgctagcgcgtcagtttggctaccgaaacctcgtttgagcgacgcggacattgccttgagcgtcgactgtgcatcccacccatgaacgaggtaaaacggagtttccttcctcgtcgtatcacgggagttattgatggcgaagatcagtctttcggcgatctcgtcccaatcctgctgcaatgggtcttcagcgtatacgcggactgactgcatgatcgtcttcaccgatctctcctgctgaccgttggcctgcggtcggtagctcagggtcgctctcgaccgagactgcatcattgctgcgaaggctcataaatcgaggatctcggtcatgacggatcaaggacggtgccccaaaacgttggtagacacactcctcgaaagcttgcgcaacgcgtaaggcggtagtgtcagacatggctttgcccatcacgaatcccgtgaacgagcattggaacagcaggagagccgtgttgccacggcgactcttcggtagcggtatcacgaaatccatagagactagttggaagggcctctcggctaggatgttccctggcgagtacccgcggaactggggtcggctcttacttgaactgcagtcagggcacgacttaacgtgtttctccacatcggcatactgcccgatccagtaatagtctctcgctgctcgatgtagcgtacgagtaatatcttggtgaccgtcttcgagtgagtcatgacagctttgcaggacctcttggatcatcgttgtgggtaccacgagtctcatcttcaactcggcttgctcgtcgtcagttgaacgacggctcgttctagtgtaatatagcacatcgtcctcgctcaacacacattggtccgccattttccatgcatctcgtgctgctctgtatccaatctttgcatcgtctcctcgtagcactgccttccgattcgaccaccgtaactcttcatcttgagcggtggcgattctccttcggcgttctccttgtactaccagcgggtcaatgtcttctgcgtacggtggggctggtgacgtctcggcacgcagcggtgaagcttctgcttcattctgagactcgttcggcacaccattggcttctactcggtgagatgcatctccctgatcggtgaccgagacttcatctgcaaaccgggcgtgtttcgcctttgctctcgcgtgccgtctggtcatcacagccacatgtccgggttcagtctcgttctgccgtctgtggtcggtttctcttcgcacaaaatcgaaaaaattcttgctacgaggtttggcagaagctaccacagcccatactgtgttggccgagggtatgtcctcgacgacgcatccgtcagcaacctcgtagatgacttcagcgatacggttcagcttcatcagctctaatactcggtcgtccgacgataccaccgtagacttcttgcactcgagagtctcgctttccagagagtcggccgcagcgttaaactctctcaccacatgcaggtacttcaccgaccgcagtttggccgtgatttcttgtggtgaatgagttgttgcagcaatgactccttccggcaggctaccacccctagggcttgctggatcgcgagcctcgaatcgccaacgacgactagatcgtcggctccatgctgtaatgcagcagagacgccgttgttcatttcggtgtactcagcgaggttgaccgtggtgttctcgaggtaagcgctcgcggcaagcactacagtcgactctggtagcttccatagtatccacgagcaactgccatatccaccattcttcttggtcttcgcagacccgtcaaacgacataacgaagcctcgataggactgcggtaggcgtgcgtagagcagatgcgggtccaaacgagcagtcggtggccctcgcgtccgggtgttaccaacgccagtgacttatccaaatcaacgaaattcgtcaggccggcttggagtagctgggcgaacgaacagtcggtttctttgactcgttcgaccaataggtgccacggtgacagcaagacggcgaactggggagcccgaccgaacaatgtcttggacttgtggacccagtcgagtgtcgaaaaccgagtgcagacccggactcgctgtccaacgagttgagtataacacaccttcagtatcagcagaagcgcgaggacctctttctcggccgggtgataattcatctcagcatccttcaaaacacgtccgcagaagcgaacggggtgtagtttgccctcgtgctcttgtatcaacgtggaacttagagcccactcgttggcaaacagcataacatgtacgtccttcttccggtcaaaatgtcgtagtatcggcgctgccgagatcctctgttggagcatcgcaaagctgtgcttggccgcggtgaggtcacccccggctggaagtcctcgtccttaagctggtacagcgctgctccatagaccgcgacgtcttggatgaagcgactgtaatagttgagtgccccaaggaagtactgcattcctttcctctttgacgggaacggaagctcggtcaccccagccagcttcttagtgtccggtcggataccttttgccgagactttgtgggacaggaagtctactttggactgcacgaagatgctcttcgtgatgctgatactaatacggtactcttcgaaccgtgccagcaatcggtctagcgtcgccaagcacgactcgaaagtctcggcaccgaaacagatatcatccacgaaggaccggcgtctgaatacttgtgtcaacgaggattcatcgggctccccgttggcgaacatgtcggcgatagggctgttgactagttcggctacagcttccttaccaagcgagttatctcggtcggcctcgaacttggtccggaatggttttggcgcgccagtcgaagcctcgttcaccccagcatgagcttccttgtcatgttcttcagctagacgtatgcgctccgagaatttaaaccatcctcccttcggttggacgaagccccaaagcgcgttgtcaatcatgcgttgatagatcatcggtgcgttcttcaggccgaaaggcatacgcaaccactcgaagtgccctagtgcgcagacgaaagcagagatcttccgagctcgttcggtcatcataatggcccagaagccgctagcggcgttgagcgagcaaaaccacaagtacgcctccatgtcctgtagcgcgtactccataatctcggtgatcgcattaacgagcttgtagtcgatacacaggcggatatccaccccattcttcttcaggacgatgacgattggcgacgcccatgggctgtccgagaaggagataagcccggccttcagcagacccttcagcaattcgtacagcttaccgaggaagcgaagcgggatccgccgagccttctgtttgatcggcacgtgcccctgtacattgatgtcacatacaacaccataggctggaggcggcagagcgttgccactcggaatcatgatcttctcgtggctcttcagcacatcgaccagatccgtctgctgcttctcgctcagctcgtgacacgaggcggcccccagaaaatcgccgacgatgtgccgtcaccctttggacttggagtttgtattggatgctgattggtggatgacttggatacggcgcggctgtacccgtgtgacatggatgacgactgtgggagagaagtgatttctcgggatgaatccagcgcctgaccacagatgggcccagctggctggaagtgtgaatcctgggagtgcacgcccaggatttcagagaacactcagtccagccgcggactttcccttaggatgagtgcctaaagtctggtggaaagtgtctctggagaatgtatcccagagtacacctcatcttgctgtggctcagagtgccccagaggatccaattaccctgagaatcaacccactaactccatgatcatgcgcaggaggccgctaaacccgctaaaaagcttggacttgtggagatacacgcgagtctgtgatgtagcagatttgtaacccagagtgccgcacgatgacccagagttcaccaccctgagtgcaggtgacccagagttccaaaaaatgattctctgggtttggaccataaatccagactctctatactgaacttaagtgtttcccaagccaacatccaagattcctcagaattccccaggatttcagaagatgaccctgagtgtcacatgattttcagggattcaagccagctcgaagtcagtctgcaatcaaagttatgcgtgaccttgaagaaccgctatggatgcgcagactggatactttcgaggagccgagagggagtcctgcgcaatattaaaccaagtccaaggacccacaattgatactttcgacgccgtgcgagaaacggagtcgcaagccgatcgcaagttgggcccgctgagcccaaggtatactcaagacaagacgtttgaccccaagcatagtgaacagaagatatttgcccgaagaagaatgcagaagagaaagaagtaagagagagagagagaagtagctgataaaagacaaacagagttccttttaccctgtactgcgcaagtgacttcggccaagcctgccgacggaaatccggaggacccgagactacgaccgcgggacgctaagggcacatcaacggcgaaggacagccgtgtgtgaggactccttcaaactcaagtccagttaggtggggaccagcgacggccttgagcttcctggagtgatccacctattccatatcctagttgggtcacttgctgtgctcgtggtagcccatttcatattattccagagggtattctggggtgctaggtagtcgcctccaggattttgtattgactgtttgtgtgaagggaaggtaactgatagtgattgtattttcctcctttattggaggtggtgcgcgtttgtgtgagtctcaggggatctaggcccctgaatttcagacctagtgtgtgtgacccaccgtccaagggtccaaaagaataagtgacggctagttgtagtgtttgtatactctgtatttgttggttttctcgagctaggagggcatttgggtaaggtttcttctgagttccaagtgccagagttgactgaaatcctggaccctgaattcgtgatattctgggtttcgggggatctgattctctgggtttgccttttggtgtggaggtgcgttctgaagtagacgtgcactcgcgcacttcttcgacgctacatttacaaccggtggagtgccgttccgtcgaagacaaacgagccgacagggattacacaaggtacccacgccaaccaaggagtgtgattcccagggtttaaagcttcgcggctgcgaatctctgggtctcaagtcgattctctgggtctacaccctggggaacagtcttgggctgcgctatacgaacccccctgggcgacaaaggtttcatcgggcctcgcttcagctggtgcgcgtgcccggattcgattgtcgaggatttcgccggattcaagtgttgaagaagtgctgagtgcccgtcagcttcaagctaccaagatgcctggaggacgaggggcgaagaagggtggacgcggtgatggaggacacggtaaggcgtcacgccagtcgcgtcgtgttcaaggtatagagcctgaggagcacaaggacctggaaacagtcgtccgcgacgctcggaaggcgaagaaggctgctcgcgagagtgaggcaatgcaaggtggggacgtcgaagcgtctgcagttcaagatcagcctgctgctggatcgcaaactcaggagggagaagtttcccctgcgttccaaggttcgacggaggtgaactctgggtcgcggattcctgaagtcccagaggagcacacccgcgagggtggtgctcaggcgtctgagggaagcgccaatgcggttgagcccccggaggtgattgacttggtctcatcttcggacgagtctgttgtggaagtgaaggcggagcccgtgcgagcgaaggaggaggcgaagactcagagttccaaggtgaattctgggttcgcaccacctgaacccagggtttcagcgccaagttcgcaagcggcacccaggaaaacgcctgaagacgacgtccgggaagctgctgctcctgctccggaatcgggagcagcggcgttggacacggagagcatggtgctgtacgtccgacgtgaagtccgacgctggaaagaagtgaaccctgggaaggtgacgctcccaagtgtcgtctatgagtggccgactccgaaaccggaggccaactcgtacttcgcggctgcgtacgcaacgggagactacttcaagtggcgtttgtctctggcgaaccaagacgaagcttggatctctgagttccacctcgcccggtggggtgtcggaactgcccaggatctcatggcgactacgattccccagagtatcatgaccgcacgcgagtgcgtcgccatgctgcagactctgttcttcgaagcgggattcgagtttgtaaacttgatccctggctggtcttcgacgcgtgcttccaggattccagaaaccctggtacgctcggtcatggaggaagtccagaatttcattgcggtggaactggtcgagtggagattggtgatagctggtgtgcctttcaaggtaaactctgaagatcacgccacaccaagcgcccaagatcaagcgccaaaactggattaccacaaggaagatggagacggtgatctattgatgacggactacgatgcggatctactgggccgacagtttgtcctgagatccagggtcaccggactcaggatttcacagagcccgcgaaggtgaagtgatggtgagccgcgatccaagcgcccacaacatggaccgcctcgcccgcaagtcccgtcgacgccatccgcgctgtctacaccgtcgttgtcttctctttcagcgtacaagtcctcgactggcgtttcgctccagggttccactcccctgaattccatgtccaatggacatgattctctggaggcggaagccaaggacgctgcccggcacgttgccaagtgccatcggtacctcgcgtgcttcagatgcgccgatgagcggagtcaacaccagagttccaagagcgaggtgcgctctcgacgctcgacgatgtccagaaaatcagctgcgtcgagtcgctcgagtggatcnnnnnnnnnnnnnnnnnnnnnnnnnnnnnnnnnnnnnnnnnnnnnnnnnnnnnnnnnnnnnnnnnnnnnnnnnnnnnnnnnnnnnnnnnnnnnnnnnnnnctcaaaactgtcttcaggcagtagttcctcgtcgaagtcaagacgagtgtcttcggtgaccccacgagccaaacgaaccctcggtcggccttcgaattcgtccactgacttgagtcgtgaaacatgcaccaccgggtagaaccggtatccacttcggtcgggtaggtccaactcatacgcaaactcttcgaccttcttcttcacgcggaacggtccgtgccaccgatgggctcagtcctggtcgaacccgctccatgtacagccacactctgctcccaggctgcaaagcaagcctcgttctcgtcactgtagctccaccatggtcaggggaactcgatgctcggtcgaccgaggttctattctcgccgacgcctgccgtagctccttctccttccttccaagtgatgcattgtgctcttcagctctccgagccttttccgcggcttggtactccttggtcatcctcagggcgatttcctgctgtcggttgacctctcggcgccatgctagcgcgtcagtttggctaccgaaacctcgtttgagcgacgcggacattgccttgagcgtcgactgtgcatcccacccatgaacgaggtaaaacggagtttccttcctcgtcgtatcacgggagttattgatggcgaagatcagtctttcggcgatctcgtcccaatcctgctgcaatgggtcttcagcgtatacgcggactgacttcatgatcgtcttcaccgatctctcctgctgaccgttggcctgcggtcggtagctcagggtcgctctcgaccgagactgcatcattgctgcgaaggctcataaatcgaggatctcggtcatgacggatcaaggacggtgccccaaaacgttggtagacacactcctcgaaagcttgcgcaacgcgtaaggcggtagtgtcagacatggctttgcccatcacgaatcccgtgaacgagcattggaacagcaggagagccgtgttgccacggcgactcttcggtagcggtatcacgaaatccatagagactagttggaagggcctctcggctaggatgttccctggcgagtacccgcggaactggggtcggctcttacttgaactgcagtcagggcacgacttaacgtgtttctccacatcggcatactgcccgatccagtaatagtctctcgctgctcgatgtagcgtacgagtaatatcttggtgaccgtcttcgagtgagtcatgacagctttgcaggacctcttggatcatcgttgtgggtaccacgagtctcatcttcaactcggcttgctcgtcgtcagttgaacgacggctcgttctagtgtaatatagcacatcgtcctcgctcaacacacattggtccgccattttccatgcatctcgtgctgctctgtatccaatctttgcatcgtctcctcgtagcactgccttccgattcgaccaccgtaactcttcatcttgagcggtggcgattctccttcggcgttctccttgtactaccagcgggtcaatgtcttctgcgtacggtggggctggtgacgtctcggcacgcagcggtgaagcttctgcttcattctgagactcgttcggcacaccattggcttctactcggtgagatgcatctccctgatcggtgaccgagacttcatctgcaaaccgggcgtgtttcgcctttgctctcgcgtgccgtctggtcatcacagccacatgtccgggttcagtctcgttctgccgtctgtggtcggtttctcttcgcacaaaatcgaaaaaattcttgctacgaggtttggcagaagctaccacagcccatactgtgttggccgagggtatgtcctcgacgacgcatccgtcagcaacctcgtaaatgacttcagcgatacggttcagcttcatcagctttaatactcggtcggtccgacgatcccaccgtaggcttctggcactcgagggtctcgctttccagagagtcggccgcagcgttaaactctctccccacatgcaggtacttcaccgaccgcagtttggccgtgatttcttgtggtgaatgagttgttgcagcaatgactccttccggcaggctaccacccctagggcttgctggatcgcgagcctcgaatcgccaacgacgactagatcgtcggctccatgctgtaatgcagcagagacgccgttgttcattccggtgtactcagcgaggttgaccgtggtgttctcgaggtaagcgctcgcggcaagcactacagtcgactctggtagcttccatagtatccacgagcaactgccatatccaccattcttcttggtcttcgcagacccgtcaaacgacataacgaagcctcgataggactgcggtaggcgtgcgtagagcagatgcgggtccaaacgagcagtcggtggccctcgcgtccgggtgttaccaacgccagtgacttatccaaatcaacgaaattcgtcaggccggcttggagtagctgggcgaacgaacagtcggtttctttgactcgttcgaccaataggtgccacggtgacagcaagacggcgaactggggagcccgaccgaacaatgtcttggacttgtggacccagtcgagtgtcgaaaaccgagtgcagacccggactcgctgtccaacgagttgagtataacacaccttcagtatcagcagaagcgcgaggacctctttctcggccgggtgataattcatctcagcatccttcaaaacacgtccgcagaagcgaacggggtgtagtttgccctcgtgctcttgcatcaacgtggaacttagagcccactcgttggcaaacagcataacatgtacgtccttcttccggtcaaaatgtcgtagtatcggcgctgccgagatcctctgttggagcatcgcaaagctgtgcttggccgcggtgaggtcacccccggctggaagtcctcgtccttaagctggtacagcgctgctccatagaccgcgacgtcttggatgaagcgactgtaatagttgagtgccccaaggaagtactgcattcctttcctctttgacgggaacggaagctcggtcaccccagccagcttcttagtgtccggtcggataccttttgccgagactttgtgggacaggaagtctactttggactgcacgaagatgctcttcgtgatgctgatactaatacggtactcttcgaaccgtaccagcaatcggtctagcgtcgccaagcacgactcgaaagtctcggcaccgaaacagatatcatacacgaaggaccggcgtctgaatacttgtgtcaacgaggattcatcgggctccccgttggtgaacatgtcggcgatagggctgttgactagttcggctacagctcccttaccaagcgagttatctcggtcggcctcgaacttggtccggaatggttttggcgcgccagtcgaagcctcgttcaccccagcatgagcttccttgtcatgttcttcagctagacgtatgcgctccgagaatttaaaccatcctcccttcggttggacgaagccccaaagcgcgttgtcaatcatgcgttgatagatcatcggtgcgttcttcaggccgaaaggcatacgcaaccactcgaagtgccctagtgcgcagacgaaagcagagatcttccgagctcgttcggtcatcataatggcccagaagccgctagcggcgtcgagcgagcaaaaccacaagtacgcctccatgtcctgtagcgcgtactccataatctcggtgatcgcattaacgagcttgtagtcgatacacaggcggatatccaccccattcttcttcaggacgatgacgattggcgacgcccatgggctgtccgagaaggagataagcccggccttcagcagacccttcagcaattcgtacagcttaccgaggaagcgaagcggggtccgccgagccttctgtttgatcggcacgtgcccctgtacattgatgtcacatacaacaccataggctggaggcggcagagcgttgccactcggaatcatgatcttctcgtggctcttcagcacatcgaccagatccgtctgctgcttctcgctcagctcgtgacacgaggcggcccccagaaaatcgccgacgatgtgccgtcaccctttggacttggagtttgtattggatgctgattggtggatgacttggatacggcgcggctgtacccgtgtgacatggatgacgactgtgggagagaagtgatttctcgggatgaatccagcgcctgaccacagatgggcccagctggctggaagtgtgaatcctgggagtgcacgcccaggatttcagagaacactcagtccagccgcggactttcccttaggatgagtgcctaaagtctggtggaaagtgtctctggagaatgtatcccagagtacacctcatcttgctgtggctcagagtgccccagaggatccaattaccctgagaatcaacccactaactacatgatcatgcgcaggaggccgctaaacccgctaaaaagcttggacttgtggagatacacgcgagtctgtgatgtagcagatttgtaacccagagtgccgcacgatgacccagagttcaccagcctgagtgcaggtgacccagagttgcaaaaaatgattctctgggtttggaccataaatccagactctctatactgaacgtaagtgtttcccaagccaacatccaagattcctcagaattccccaggatttcagaagatgaccctgagtgtcacatgattttcagggattcaagccagctcgaagtcagtctgcaatcaaagttatgcgtgaccttgaagaaccgctatggatgcgcagactggatactttcgaggagccgagagggagtcctgcgcaatattaaaccaagtccaaggacccacaattgatactttcgacgccgtgcgagaaacggagtcgcaagccgatcgcaagttgggcccgctgagcccaaggtatactcaagacaagacgtttgaccccaagcatagtgaacagaagatatttgcccgaagaagaatgcagaagagaaagaagtaagagagagagagagaagtagctgataaaagacaaacagagttccttttaccctgtactgcgcaagtgacttcggccaagcctgccgacggaaatccggaggacccgagactacgaccgcgggacgctaagggcacatcaacggcgaaggacagccgtgtgtgaggactccttcaaactcaagtccagttaggtggggaccagcgacggccttgagcttcctggagtgatccacctattccatatcctagttgggtcacttgctgtgctcgtggtagcccatttcatattattccagagggtattctggggtgctaggtagtcgcctccaggattttgtattgactgtttgtgtgaagggaaggtaactgatagtgattgtattttcctcctttattggaggtggtgcgcgtttgtgtgagtctcaggggatctaggcccctgaatttcagacctagtgtgtgtgacccaccgtccaagggtccaaaagaataagtgacggctagttgtagtgtttgtatactctgtatttgttggttttctcgagctaggagggcatttgggtaaggtttcttctgagttccaagtgccagagttgactgaaatcctggaccctgaattcgtgatattctgggtttcgggggatctgattctctgggtttgccttttggtgtggaggtgcgttctgaagtagacgtgcactcgcgcacttcttcgacgctacatttacaaccggtggagtgccgttccgtcgaagacaaacgagccgacagggattacacaaggtacccacgccaaccaaggagtgtgattcccagggtttaaagcttcgcggctgcgaatctctgggtctcaagtcgattctctgggtctacaccctggggaacagtcttgggctgcgctatacgaacccccctgggcgacaaaggtttcatcgggcctcgcttcagctggtgcgcgtgcccggattcgattgtcgaggatttcgccggattcaagtgttgaagaagtgctgagtgcccgtcagcttcaagctaccaagatgcctggaggacgaggggcgaagaagggtggacgcggtgatggaggacacggtaaggcgtcacgccagtcgcgtcgtgttcaaggtatagagcctgaggagcacaaggacctggaaacagtcgtccgcgacgctcggaaggcgaagaaggctgctcgcgagagtgaggcaatgcaaggtggggacgtcgaagcgtctgcagttcaagatcagcctgctgctggatcgcaaactcaggagggagaagtttcccctgcgttccaaggttcgacggaggtgaactctgggtcgcggattcctgaagtcccagaggagcacacccgcgagggtggtgctcaggcgtctgagggaagcgccaatgcggttgagcccccggaggtgattgacttggtctcatcttcggacgagtctgttgtggaagtgaaggcggagcccgtgcgagcgaaggaggaggcgaagactcagagttccaaggtgaattctgggttcgcaccacctgaacccagggtttcagcgccaagttcgcaagcggcacccaggaaaacgcctgaagacgacgtccgggaagctgctgctcctgctccggaatcgggagcagcggcgttggacacggagagcatggtgctgtacgtccgacgtgaagtccgacgctggaaagaagtgaaccctgggaaggtgacgctcccaagtgtcgtctatgagtggccgactccgaaaccggaggccaactcgtacttcgcggctgcgtacgcaacgggagactacttcaagtggcgtttgtctctggcgaaccaagacgaagcttggatctctgagttccacctcgcccggtggggtgtcggaactgcccaggatctcatggcgactacgattccccagagtatcatgaccgcacgcgagtgcgtcgccatgctgcagactctgttcttcgaagcgggattcgagtttgtaaacttgatccctggctggtcttcgacgcgtgcttccaggattccagaaaccctggtacgctcggtcatggaggaagtccagaatttcattgcggtggaactggtcgagtggagattggtgatagctggtgtgcctttcaaggtaaactctgaagatcacgccacaccaagcgcccaagatcaagcgccaaaactggattaccacaaggaagatggagacggtgatctattgatgacggactacgatgcggatctactgggccgacagtttgtcctgagatccagggtcaccggactcaggatttcacagagcccgcgaaggtgaagtgatggtgagccgcgatccaagcgcccacaacatggaccgcctcgcccgcaagtcccgtcgacgccatccgcgctgtctacaccgtcgttgtcttctctttcagcgtacaagtcctcgactggcgtttcgctccagggttccactcccctgaattccatgtccaatggacatgattctctggaggcggaagccaaggacgctgcccggcacgttgccaagtgccatcggtacctcgcgtgcttcagatgcgccgatgagcggagtcaacaccagagttccaagagcgaggtgcgctctcgacgctcgacgatgtccagaaaatcagctgcgtcgagtcgctcgagtggatccgtccgtgtccgcgaggtccgggcccgctcaaatcgagctgaatgtcttgcgacaacagcaggagtggcaggcccgtatggagcaggagcaacgcgagtttctcgccagagaacgcctggatgccttggagcgcgagcgtctcagggaacaacatgacctggacgcgcgtcgccagatccaggaactcacggatcgcttggtccacgctgagaacacccgaggagaagccgaacggcgtgcgcaggacgtggaagcccgccagacccagagttccattgaaactcaggggatgacccagagtatcacggaagctgtacgtcttgagcgggagcgcctggacgccgcctatactgagcgctggcaacagcgcgaagccgaagccgactcggggcgcgcgcgctggatttccgagacctatgcgggttggaaggaacaaatgtcgactatggagcagaaagtccaggagctcgaagcggagagagagcgagagcgggagtcttccgagaatatccagcgcttccgcgctggccaagtgcgcgaccttcgtgcaacattggcctaagttcaagcgcgacgcgcaaccgctatccctgatttggcaacaaatgtgaggtcgttagcgcctctgaaccctgaagttgcaaccctaccccagaaatccagcggagtaatcagtggaaacgcaagtgtcgtaggccagagacgggagacagctgacccgaagaacacttccgaagtcgccgcctcccagctaagagcgaccctcgcgcagacttccgccgacacttccggcagagttgcgcgcggcaagcggggacatggtgctacggagaccaaggtgacgcaggatatcaagcttgagcctgtgtctctagggaaaacgtcggatcccaggagaacagcgacctctaaggcctcgcagggctcttaaacagactccaagcgctctgcgtccaataaacaccagcagaagaagaagaagcgtcaggatgtcaacccactctcggactcagacccgagttccgattccagcgatgatgactcgtcctctgaaagttcggacgacagttcggacgagaaccctggggttaacctgacggcggcctctacggctcaagctggaactacgctccttacgttccggccgtacatcaactcgaatactctgggtgagttcgacacgaaggcgtcactcagagaacgcgtacagtggtggcagcgttttgcgaacatagcggcccagggaggctggtccacgaagacgcgaattcaggagctcaagttgaaactctcgggagctgcgcgtgactggttcaaccagttgcccaagcgcactcagcgtgactggaaggagttggtgtgtgcattcaggaggaagtactgcaaggcgcgctcgtcgtactctgaacgctacttcacgatggagatgaagaactcagagagcgccctggatttcttctatcgtctgaactccgccgctgggaaggctgacattgactttcgccagtcttcgaagcgtctggagaagcatatccggaggttcatcacgaaactcagggacacgcgcctcaagacgtcgctgcaaggccagagattcaggagtatcgctgatctagagtacgctctggaacaggacgaagatgtctggagtcgcagcgaccatgaccctccgccccccagagttcgtgactttcgggccgacaatatccctcaggggcacttcaagccgaaacgtgcaggacgtgcgtacgtgactagggatgatgtctctgactctgagtcggatgaagaccctgaaattcacgcgcgtttccaggaaatcacggacgaacccagagtttttcagcccgaagtgcgagcgcgaattcagggtcaactcgtgagatctctggagaagaagcttctacgtctatcgctgggagcctggcgagtatgaagggtgccgagtggactcagacgctgacgaacgaggtctatcgcgtgatggataacatgggatggcgtccaccccaaccaggatcaaacgcgaactctggattccgttcccctcgccgcgagaacccgaattgggacaagttctgcgagaagtgcggcaagtaggagcatccagaggaaaactgctggaaagacgtcaagtgtgatcgctgcctggaagtaggtcatccaaatcacttatgtcgcgcgcaaccgtgcgagtcctgtggcaaactacatctcggaaaaccgtgtgaagactggaagacactggaagctgtgaagaaactcgcccgccaaggtgcactgaaggacatgccgagccaaatcctggataaactcctggatggcgaagcaaactctgggaagccgtcaaaccaataagcccgctgggtggggacccagtacgcgccgggctgaagaaggccccagagttatgtgttctagtgtatgtagggccggagttgagaacaagaacccaagataaccaacaatgcatgactactttgactcaggatttcatgacttcccctgaaaatcagcatcctgaacaagcgaactctgggtcggtgaactctgacgaaattgtggagtacaagttgaaccctggagagcgctacgggtggtgggaaaacaatgatcctgacccaaagaaacgtgatgtggtgatggtgctgtgaacgattgccgaacgagagttctcctggataccggtgcgactgtgaatattgtgagattcgacttagcgcgtaagctcggactcacactcaagtcgcacaaacaaaccaaggtgtctggcgtgggaggcgttccgacgtacatcgatgccagtgctcatgtgaagattactctcggttcgagggtgatatatctcctggacgtctgggttgctaacatcggcgaagggatcgaagtacttctgggtatgcgtttcatgtttgcagctggagtgaggatcagtgttcgcgaaggtctcgtgacacttccggatgaagaggcgatcatgatgtgtagatggactccagaggattgcctgggtgtcgacatgcccgtggaaaccacgggtagttggtacctggcccctggggaatccaaggtggtaaagatttcgtacggaccgacgaacccacagcgtgaagttgtgtgggcaggacgaggtgaccgctaggtaacgcacctgatttacgctgcgagatcctggccggtcgctgtgaaggtggtcaacatctcggacaagaacgtctggattcacaacagaacgccagtcgcctgaatagtggagtatggtttcttcccacgcgccgaacgctttgagcgccctggttcttttgcgtatcgggagtggcagactcttatcctggagagtgttcagtcacgtgagggcagacttcgtgcggaacgccgggctgcgctggagccatcctgtgtcgagaccccagagtatcagtggcctacgaagattctgccgcgacctgctaagggccccgacatggcactgcttgcctcgattctcaggaaaccggagacgcgtcgcgtgcgtttcgcggaagacgctgcaactcagaccgaagaagtgctccctggagaccctcctgagttccgagacgttgcggttgatacgagtgacttaggtgacgctctgaaggatgcggtgaccgatgctgcctcgcagactgtcggaatcccagagtgcatgagtcctggagatgatacggccgccgaaaccctgagtttacaggttgaagttggcagtgattctcagggtcagcggggcgaggaaggtgattctctgggattcgaggtggatgacgacgattctcagggtgctgtcgaagaatactgggatatcccgatctcagagatgcgggggtgcaatgggccccatttacataagtaggtagattgacagtacataaagtagttaagtcagtacacggctagcgtgtactgacggtcatcgtgattggctgaattgggggagccagaccccatttcagccaatcaggcgttgacctgcattgagtggctcacatgagaccaggggtagccgccctggtccttacataaaacggagttgattttacccaagactgactgcttggtctcattaaatccgagtcttaactaagcttcctcatcgctacgtgtaagctagtaacggacacacacctggcccgttacacctggaagcactttgtagtccttccaacgaccaagaccaagatgagccaagtcctgacgtccggaccttcaggggcaaccctggtgcatggtgccttcccccatctcacgcggattgagtgggaagctctccaccgcctcgcggcggtgtccggagaggctgttgtcacctcgctgctgagctcagcgatgccggaacaacagcgccaagcttcccaagaattcatggaacgcgagctcgccgacgcgaatcggcgggtcacaactccctcgcgctcctcgaggatcgacgtcgtcaaactcgagacatcgacatactccggtgtgggtgacgaccggattccgctgaaccgctggttccgcgagatcgacatcgctatcgcctcgcgcatgattgaagcgccggcggccaagttcaacttcctactctcccggctgtcnnnnnnnnnnnnnnnnnnnnnnnnnnnnnnnnnnnnnnnnnnnnnnnnnnnnnnnnnnnnnnnnnnnnnnnnnnnnnnnnnnnnnnnnnnnnnnnnnnnnnnnnnnnnnnnnnnnnnnnnnnnnnnnnnnnnnnnnnnnnnnnnnnnnnnnnnnnnnnnnnnnnnnnnnnnnnnnnnnnnnnnnnnnnnnnnnnnnnnnnnnnnnnnnnnnnnnnnnnnnnnnnnnnnnnnnnnnnnnnnnnnnnnnnnnnnnnnnnnnnnnnnnnnnnnnnnnnnnnnnnnnnnnnnnnnnnnnnnnnnnnnnnnnnnnnnnnnnnnnnnnnnnnnnnnnnnnnnnnnnnnnnnnnnnnnnnnnnnnnnnnnnnnnnnnnnnnnnnnnnnnnnnnnnnnnnnnnnnnnnnnnnnnnnnnnnnnnnnnnnnnnnnnnnnnnnnnnnnnnnnnnnnnnnnnnnnnnnnnnnnnnnnnnnnnnnnnnnnnnnnnnnnnnnnnnnnnnnnnnnnnnnnnnnnnnnnnnnnnnnnnnnnnnnnnnnnnnnnnnnnnnnnnnnnnnnnnnnnnnnnnnnnnnnnnnnnnnnnnnnnnnnnnnnnnnnnnnnnnnnnnnnnnnnnnnnnnnnnnnnnnnnnnnnnnnnnnnnnnnnnnnnnnnnnnnnnnnnnnnnnnnnnnnnnnnnnnnnnnnnnnnnnnnnnnnnnnnnnnnnnnnnnnnnnnnnnnnnnnnnnnnnnnnnnnnnnnnnnnnnnnnnnnnnnnnnnnnnnnnnnnnnnnnnnnnnnnnnnnnnnnnnnnnnnnnnnnnnnnnnnnnnnnnnnnnnnnnnnnnnnnnnnnnnnnnnnnnnnnnnnnnnnnnnnnnnnnnnnnnnnnnnnnnnnnnnnnnnnnnnnnnnnnnnnnnnnnnnnnnnnnnnnnnnnnnnnnnnnnnnnnnnnnnnnnnnnnnnnnnnnnnnnnnnnnnnnnnnnnnnnnnnnnnnnnnnnnnnnnnnnnnnnnnnnnnnnnnnnnnnnnnnnnnnnnnnnnnnnnnnnnnnnnnnnnnnnnnnnnnnnnnnnnnnnnnnnnnnnnnnnnnnnnnnnnnnnnnnnnnnnnnnnnnnnnnnnnnnnnnnnnnnnnnnnnnnnnnnnnnnnnnnnnnnnnnnnnnnnnnnnnnnnnnnnnnnnnnnnnnnnnnnnnnnnnnnnnnnnnnnnnnnnnnnnnnnnnnnnnnnnnnnnnnnnnnnnnnnnnnnnnnnnnnnnnnnnnnnnnnnnnnnnnnnnnnnnnnnnnnnnnnnnnnnnnnnnnnnnnnnnnnnnnnnnnnnnnnnnnnnnnnnnnnnnnnnnnnnnnnnnnnnnnnnnnnnnnnnnnnnnnnnnnnnnnnnnnnnnnnnnnnnnnnnnnnnnnnnnnnnnnnnnnnnnnnnnnnnnnnnnnnnnnnnnnnnnnnnnnnnnnnnnnnnnnnnnnnnnnnnnnnnnnnnnnnnnnnnnnnnnnnnnnnnnnnnnnnnnnnnnnnnnnnnnnnnnnnnnnnnnnnnnnnnnnnnnnnnnnnnnnnnnnnnnnnnnnnnnnnnnnnnnnnnnnnnnnnnnnnnnnnnnnnnnnnnnnnnnnnnnnnnnnnnnnnnnnnnnnnnnnnnnnnnnnnnnnnnnnnnnnnnnnnnnnnnnnnnnnnnnnnnnnnnnnnnnnnnnnnnnnnnnnnnnnnnnnnnnnnnnnnnnnnnnnnnnnnnnnnnnnnnnnnnnnnnnnnnnnnnnnnnnnnnnnnnnnnnnnnnnnnnnnnnnnnnnnnnnnnnnnnnnnnnnnnnnnnnnnnnnnnnnnnnnnnnnnnnnnnnnnnnnnnnnnnnnnnnnnnnnnnnnnnnnnnnnnnnnnnnnnnnnnnnnnnnnnnnnnnnnnnnnnnnnnnnnnnnnnnnnnnnnnnnnnnnnnnnnnnnnnnnnnnnnnnnnnnnnnnnnnnnnnnnnnnnnnnnnnnnnnnnnnnnnnnnnnnnnnnnnnnnnnnnnnnnnnnnnnnnnnnnnnnnnnnnnnnnnnnnnnnnnnnnnnnnnnnnnnnnnnnnnnnnnnnnnnnnnnnnnnnnnnnnnnnnnnnnnnnnnnnnnnnnnnnnnnnnnnnnnnnnnnnnnnnnnnnnnnnnnnnnnnnnnnnnnnnnnnnnnnnnnnnnnnnnnnnnnnnnnnnnnnnnnnnnnnnnnnnnnnnnnnnnnnnnnnnnnnnnnnnnnnnnnnnnnnnnnnnnnnnnnnnnnnnnnnnnnnnnnnnnnnnnnnnnnnnnnnnnnnnnnnnnnnnnnnnnnnnnnnnnnnnnnnnnnnnnnnnnnnnnnnnnnnnnnnnnnnnnnnnnnnnnnnnnnnnnnnnnnnnnnnnnnnnnnnnnnnnnnnnnnnnnnnnnnnnnnnnnnnnnnnnnnnnnnnnnnnnnnnnnnnnnnnnnnnnnnnnnnnnnnnnnnnnnnnnnnnnnnnnnnnnnnnnnnnnnnnnnnnnnnnnnnnnnnnnnnnnnnnnnnnnnnnnnnnnnnnnnnnnnnnnnnnnnnnnnnnnnnnnnnnnnnnnnnnnnnnnnnnnnnnnnnnnnnnnnnnnnnnnnnnnnnnnnnnnnnnnnnnnnnnnnnnnnnnnnnnnnnnnnnnnnnnnnnnnnnnnnnnnnnnnnnnnnnnnnnnnnnnnnnnnnnnnnnnnnnnnnnnnnnnnnnnnnnnnnnnnnnnnnnnnnnnnnnnnnnnnnnnnnnnnnnnnnnnnnnnnnnnnnnnnnnnnnnnnnnnnnnnnnnnnnnnnnnnnnnnnnnnnnnnnnnnnnnnnnnnnnnnnnnnnnnnnnnnnnnnnnnnnnnnnnnnnnnnnnnnnnnnnnnnnnnnnnnnnnnnnnnnnnnnnnnnnnnnnnnnnnnnnnnnnnnnnnnnnnnnnnnnnnnnnnnnnnnnnnnnnnnnnnnnnnnnnnnnnnnnnnnnnnnnnnnnnnnnnnnnnnnnnnnnnnnnnnnnnnnnnnnnnnnnnnnnnnnnnnnnnnnnnnnnnnnnnnnnnnnnnnnnnnnnnnnnnnnnnnnnnnnnnnnnnnnnnnnnnnnnnnnnnnnnnnnnnnnnnnnnnnnnnnnnnnnnnnnnnnnnnnnnnnnnnnnnnnnnnnnnnnnnnnnnnnnnnnnnnnnnnnnnnnnnnnnnnnnnnnnnnnnnnnnnnnnnnnnnnnnnnnnnnnnnnnnnnnnnnccgcttcgggacaagatcgccgcagcgtacgagcatgacgcgcagtacgccagcatcctggcccacctccgctctccatgcgaggcgacattgaaggctctgtcgcgctcgacccgcagccacgtcgagcgatatcggcttgatggctccctgctgacgtacaccatcgaccgattcgatgccctgagagtggtagggccgaatgacgaacaccttcgcgcccgtatcatccatgagtaccacgacgctccgatcgggggtcacttgggacgcgaaaagaccttcgcggcggtggcgcgagacttcttctggccccacttgtacaagtgggtgcgcacttgcgagatctgccagcgagtaaagcccccgccgtcatcgcaggctccgctgcgtccacttccggcccccacggaagcctggcgctccgactcgatggacttcgtctttggtcttccacccgactcgaacgggcgcacgggagtcctcgttttcgtcgacaggttcagcaagatggtgcatctcgttcctgtggccgccacggttactacggaagagtccgcagcccacttcgtcgacgccgccttccgccttcatggtctgcccgactccatcgtctcggatcgggatccgaggttcacgtccgcattttggacggagtagttcaagttgcttggaacgaagctggtgatgtccaccgcggctcacccggagacggatggacaaaccgaacgcgtcaaccgcgtcgtcgaagacgtgctccgcagctacgctacgtcgttcccgagctggagcgccttcctgcccctgaccgagttcgctctgaacaacgccgagcactcgtcgacgggcatgactccattcttcgtgagctccgcgcgccacccgcgtgtacccgctatgcttgctatgagccaacccacggcggctcgtgcctctacgcttgatgggggaggagctgccgctaaagactcaccgccaaccaagacgccggcagagtcgtcgccggtcgaatcaccggcgccgccacgcttaccagtgaccgaatcaagcgcgaatgcagtgacacgatcccaagtgaagaaggccctcactgcaccgcgcagtgcggtgacgccgctcgcagactggacggagcgcactctgatcgatcccgctggcgcaccagcgacaaagcagcaaccggctattcccgctaactacgcaccgaagtcctcagcgggccccgcagaccactccgcggtctccgagtttgtgcagcagcgtcaggcaatcaaacgtttcgtgcgggacgcactgcaagctgcagtagacaagcagaaggaaaacacagaaaagcatgggcgcaagaacaagacttcatttcgcacgggtgaccgtgtgttactgtccaccgaaggcatccgctcctccgcagtgaccaacctcggtgccaagaagctcgcgccgcgcttcatcggcccgttcaaggtgatcaaggtcctcggcgccgcgtacacactggacatcccgtcgtcgctgcgtcttcacccgactttctacgtcgggcgcctcaagcgatattatactgccgatattctgacctctgatcaccaggattcactggcgggtaatgtacccgaggctactcgcgacgccaacacccatcacccaagcctgtaccgtcgcgatggtccttctccgattgtcgactcggcgggtgaagcgcgctggattgtggaccgcatcgtttgccacgaggacccatctctgggtttccacctgacgaggacacgtgggagacgcgtgcagctcttcttcgggatgtccccgatgttgttcgtgactatgaggcgaaggtcgctgctgctgaagagaccacggagctccccgcggaagctgaagcctcaagtgagcgtgatgatggaagtggacccccaccgcaagctcgcggtggcgttcaccgcgaagactaagaagaaaacctgacgacgaccgccggactcgaaccggtgacctccgccttggtggcgcagcgttcgaccactgcgctagctggacttcgagtccccacgacggaccgcccgacctgatcaagcttggagcgactgcgcatggcaagtggcaagaaggattcgcgtggggatcgaacccacgcgtcacagctcagcacggcgagcgcttgcccactacaccgctccaccgatgatcgccggtgtcgaagatgtccaagctggtctcgctgttccgtccgttcgagtcgacggttacgcgactagttacttcgaagggtcgtagcgaggagccacgccacgctgatcgccatcctgtgtctcgacactcgccggttctccgctctgtgcgcatcacagttgcgcttgtcgtcaagcgttggtgtcgcttcccatgctgcgtcgttgccacgaccgccgtcccttcgggtgtccgtggatgtccgcggccacttggggcgctgcgcattgcttcggcgtgtgcgccgacgagatgtctcggtgtgtgtaagcttgctgctcttgcgtcgtcctgtgtcgctcggtggcacgagcgccgtccctccgccgcctcggtcgtccatggtgttcttcgagtgttctttcggaaatgtgtcttttgcgcttacgttgcgtaagcgcaactttgagagggggggtgatgtaatgggccccatttacataagnnnnnnnnnnnnnnnnnnnnnnnnnnnnnnnnnnnnnnnnnnnnnnnnnnnnnnnnnnnnnnnnnnnnnnnnnnnnnnnnnnnnnnnnnnnnnnnnnnnnnnnnnnnnnnnnnnnnnnnnnnnnnnnnnnnnnnnnnnnnnnnnnnnnnnnnnnnnnnnnnnnnnnnnnnnnnnnnnnnnnnnnnnnnnnnnnnnnnnnnnnnnnnnnnnnnnnnnnnnnnnnnnnnnnnnnnnnnnnnnnnnnnnnnnnnnnnnnnnnnnnnnnnnnnnnnnnnnnnnnnnnnnnnnnnnnnnnnnnnnnnnnnnnnnnnnnnnnnnnnnnnnnnnnnnnnnnnnnnnnnnnnnnnnnnnnnnnnnnnnnnnnnnnnnnnnnnnnnnnnnnnnnnnnnnnnnnnnnnnnnnnnnnnnnnnnnnnnnnnnnnnnnnnnnnnnnnnnnnnnnnnnnnnnnnnnnnnnnnnnnnnnnnnnnnnnnnnnnnnnnnnnnnnnnnnnnnnnnnnnnnnnnnnnnnnnnnnnnnnnnnnnnnnnnnnnnnnnnnnnnnnnnnnnnnnnnnnnnnnnnnnnnnnnnnnnnnnnnnnnnnnnnnnnnnnnnnnnnnnnnnnnnnnnnnnnnnnnnnnnnnnnnnnnnnnnnnnnnnnnnnnnnnnnnnnnnnnnnnnnnnnnnnnnnnnnnnnnnnnnnnnnnnnnnnnnnnnnnnnnnnnnnnnnnnnnnnnnnnnnnnnnnnnnnnnnnnnnnnnnnnnnnnnnnnnnnnnnnnnnnnnnnnnnnnnnnnnnnnnnnnnnnnnnnnnnnnnnnnnnnnnnnnnnnnnnnnnnnnnnnnnnnnnnnnnnnnnnnnnnnnnnnnnnnnnnnnnnnnnnnnnnnnnnnnnnnnnnnnnnnnnnnnnnnnnnnnnnnnnnnnnnnnnnnnnnnnnnnnnnnnnnnnnnnnnnnnnnnnnnnnnnnnnnnnnnnnnnnnnnnnnnnnnnnnnnnnnnnnnnnnnnnnnnnnnnnnnnnnnnnnnnnnnnnnnnnnnnnnnnnnnnnnnnnnnnnnnnnnnnnnnnnnnnnnnnnnnnnnnnnnnnnnnnnnnnnnnnnnnnnnnnnnnnnnnnnnnnnnnnnnnnnnnnnnnnnnnnnnnnnnnnnnnnnnnnnnnnnnnnnnnnnnnnnnnnnnnnnnnnnnnnnnnnnnnnnnnnnnnnnnnnnnnnnnnnnnnnnnnnnnnnnnnnnnnnnnnnnnnnnnnnnnnnnnnnnnnnnnnnnnnnnnnnnnnnnnnnnnnnnnnnnnnnnnnnnnnnnnnnnnnnnnnnnnnnnnnnnnnnnnnnnnnnnnnnnnnnnnnnnnnnnnnnnnnnnnnnnnnnnnnnnnnnnnnnnnnnnnnnnnnnnnnnnnnnnnnnnnnnnnnnnnnnnnnnnnnnnnnnnnnnnnnnnnnnnnnnnnnnnnnnnnnnnnnnnnnnnnnnnnnnnnnnnnnnnnnnnnnnnnnnnnnnnnnnnnnnnnnnnnnnnnnnnnnnnnnnnnnnnnnnnnnnnnnnnnnnnnnnnnnnnnnnnnnnnnnnnnnnnnnnnnnnnnnnnnnnnnnnnnnnnnnnnnnnnnnnnnnnnnnnnnnnnnnnnnnnnnnnnnnnnnnnnnnnnnnnnnnnnnnnnnnnnnnnnnnnnnnnnnnnnnnnnnnnnnnnnnnnnnnnnnnnnnnnnnnnnnnnnnnnnnnnnnnnnnnnnnnnnnnnnnnnnnnnnnnnnnnnnnnnnnnnnnnnnnnnnnnnnnnnnnnnnnnnnnnnnnnnnnnnnnnnnnnnnnnnnnnnnnnnnnnnnnnnnnnnnnnnnnnnnnnnnnnnnnnnnnnnnnnnnnnnnnnnnnnnnnnnnnnnnnnnnnnnnnnnnnnnnnnnnnnnnnnnnnnnnnnnnnnnnnnnnnnnnnnnnnnnnnnnnnnnnnnnnnnnnnnnnnnnnnnnnnnnnnnnnnnnnnnnnnnnnnnnnnnnnnnnnnnnnnnnnnnnnnnnnnnnnnnnnnnnnnnnnnnnnnnnnnnnnnnnnnnnnnnnnnnnnnnnnnnnnnnnnnnnnnnnnnnnnnnnnnnnnnnnnnnnnnnnnnnnnnnnnnnnnnnnnnnnnnnnnnnnnnnnnnnnnnnnnnnnnnnnnnnnnnnnnnnnnnnnnnnnnnnnnnnnnnnnnnnnnnnnnnnnnnnnnnnnnnnnnnnnnnnnnnnnnnnnnnnnnnnnnnnnnnnnnnnnnnnnnnnnnnnnnnnnnnnnnnnnnnnnnnnnnnnnnnnnnnnnnnnnnnnnnnnnnnnnnnnnnnnnnnnnnnnnnnnnnnnnnnnnnnnnnnnnnnnnnnnnnnnnnnnnnnnnnnnnnnnnnnnnnnnnnnnnnnnnnnnnnnnnnnnnnnnnnnnnnnnnnnnnnnnnnnnnnnnnnnnnnnnnnnnnnnnnnnnnnnnnnnnnnnnnnnnnnnnnnnnnnnnnnnnnnnnnnnnnnnnnnnnnnnnnnnnnnnnnnnnnnnnnnnnnnnnnnnnnnnnnnnnnnnnnnnnnnnnnnnnnnnnnnnnnnnnnnnnnnnnnnnnnnnnnnnnnnnnnnnnnnnnnnnnnnnnnnnnnnnnnnnnnnnnnnnnnnnnnnnnnnnnnnnnnnnnnnnnnnnnnnnnnnnnnnnnnnnnnnnnnnnnnnnnnnnnnnnnnnnnnnnnnnnnnnnnnnnnnnnnnnnnnnnnnnnnnnnnnnnnnnnnnnnnnnnnnnnnnnnnnnnnnnnnnnnnnnnnnnnnnnnnnnnnnnnnnnnnnnnnnnnnnnnnnnnnnnnnnnnnnnnnnnnnnnnnnnnnnnnnnnnnnnnnnnnnnnnnnnnnnnnnnnnnnnnnnnnnnnnnnnnnnnnnnnnnnnnnnnnnnnnnnnnnnnnnnnnnnnnnnnnnnnnnnnnnnnnnnnnnnnnnnnnnnnnnnnnnnnnnnnnnnnnnnnnnnnnnnnnnnnnnnnnnnnnnnnnnnnnnnnnnnnnnnnnnnnnnnnnnnnnnnnnnnnnnnnnnnnnnnnnnnnnnnnnnnnnnnnnnnnnnnnnnnnnnnnnnnnnnnnnnnnnnnnnnnnnnnnnnnnnnnnnnnnnnnnnnnnnnnnnnnnnnnnnnnnnnnnnnnnnnnnnnnnnnnnnnnnnnnnnnnnnnnnnnnnnnnnnnnnnnnnnnnnnnnnnnnnnnnnnnnnnnnnnnnnnnnnnnnnnnnnnnnnnnnnnnnnnnnnnnnnnnnnnnnnnnnnnnnnnnnnnnnnnnnnnnnnnnnnnnnnnnnnnnnnnnnnnnnnnnnnnnnnnnnnnnnnnnnnnnnnnnnnnnnnnnnnnnnnnnnnnnnnnnnnnnnnnnnnnnnnnnnnnnnnnnnnnnnnnnnnnnnnnnnnnnnnnnnnnnnnnnnnnnnnnnnnnnnnnnnnnnnnnnnnnnnnnnnnnnnnnnnnnnnnnnnnnnnnnnnnnnnnnnnnnnnnnnnnnnnnnnnnnnnnnnnnnnnnnnnnnnnnnnnnnnnnnnnnnnnnnnnnnnnnnnnnnnnnnnnnnnnnnnnnnnnnnnnnnnnnnnnnnnnnnnnnnnnnnnnnnnnnnnnnnnnnnnnnnnnnnnnnnnnnnnnnnnnnnnnnnnnnnnnnnnnnnnnnnnnnnnnnnnnnnnnnnnnnnnnnnnnnnnnnnnnnnnnnnnnnnnnnnnnnnnnnnnnnnnnnnnnnnnnnnnnnnnnnnnnnnnnnnnnnnnnnnnnnnnnnnnnnnnnnnnnnnnnnnnnnnnnnnnnnnnnnnnnnnnnnnnnnnnnnnnnnnnnnnnnnnnnnnnnnnnnnnnnnnnnnnnnnnnnnnnnnnnnnnnnnnnnnnnnnnnnnnnnnnnnnnnnnnnnnnnnnnnnnnnnnnnnnnnnnnnnnnnnnnnnnnnnnnnnnnnnnnnnnnnnnnnnnnnnnnnnnnnnnnnnnnnnnnnnnnnnnnnnnnnnnnnnnnnnnnnnnnnnnnnnnnnnnnnnnnnnnnnnnnnnnnnnnnnnnnnnnnnnnnnnnnnnnnnnnnnnnnnnnnnnnnnnnnnnnnnnnnnnnnnnnnnnnnnnnnnnnnnnnnnnnnnnnnnnnnnnnnnnnnnnnnnnnnnnnnnnnnnnnnnnnnnnnnnnnnnnnnnnnnnnnnnnnnnnnnnnnnnnnnnnnnnnnnnnnnnnnnnnnnnnnnnnnnnnnnnnnnnnnnnnnnnnnnnnnnnnnnnnnnnnnnnnnnnnnnnnnnnnnnnnnnnnnnnnnnnnnnnnnnnnnnnnnnnnatgccactcgcctggacactccgtttttttctggcgcacggctaggacgcacacggtactgtgtctgcaatgctgggacccaggccttcaagtatccaggagcgcaccgcgtacgagtggcccaggaagctacagcgtgactacagttatgcacaagcttgcgctgagaatctccagaagaaggccaagcgggcgcgctctgccgaacaaaccaggaagtggtgagagctgtccgaacgactgaaggcaggattcgcagtcggtgatgctgggtggctgtgtggctgtatataccgaaggtgcagcccgggctgagccgcaaactggctcacatgtggcatggtaccttcagaatccaggaaatccatgacaacttccgcgtgaaactcagggtcgagaacacagggtatcgcgtgaacccctgggtacacgtgagctgtttgaaacccagagcactattcccgaagcgacccactgtggagatcgacgtggacgaggatgatgactttgatgcggcgctgctgcctgaagacaattgggagcccgacactgcgaacgacgagtacgaagttgagcgaatcctggatttgcgctggactaagcggacccggacagcgagacgtattcgcgagtaccttgtaaagtggaaggggtacgatgaggccgagtggctgcctgtgtcgaagctcaactgtggcgccctgctctacgagttcaatcaaggcgcaagagcgcgagcccgtttccaggccatgcaggctggagatgatcacccaggagtctagcagtctggggtggcaatgacccagagttacatgtgattctcaggggaaaccctgggtgacactgtgaaactctggggaaaatcgacggaatgtgtgaatattggggatggagaacgtgaatgtgatttgaattgatttgattatggagaaggtgatattgctgaggcttcggcattgtgtgaagtggtgagacagaagatcaaggcggcgagctttacgaggacctggaggcagtagacgaagttgggtgacccaggggaacgatgtcaacagacggtgaatctctggggaagactctgaaatcgagatgaaatcctggatatgttattggaaattatgctacgacatgtgaaatcccgatggttcccaggatctggtgaggacctggattctcacgagtgcttgagagacagtgggttgagcttgcggatggccaggggcttgatgtggcgcttgatgttgttaggcacgtattggagccactcatcgtcgtcagccgccgtgttccattggactcgagagggctcacgaatgtccaacgtcgctagctggacgtccaagtccttgcacttagctcccccgagtttcttggccctgggatccccccaaatccagtagcagcacttgtccgggaacttccagagactcggttcgtgccacaacgacgggatgaaccctggggtgttgtgcgagcgctcaacgagcgccttgtacgctctgcgtagcgcgtttcgacgcgacttacgctgagagtccatggtggcgtctgcttgttcttcagtcggaataggcacccagtgcccgcgctcccagattgcctgtgcgtgcttgtgcatggcgtccacgacgacctccaacagcttgagcgctttcgcggagagcagctctcgctcatggaaatagaacactcggaagcgaccctgaagcatagtctcccagggttcagaatccaggacttcttggtatgcctcacgatcccagcgctcgtgaacaacgtcgtacgaatacttgtggatctcgtactctgggaacccaggagtctggcaagacgcactcttggtcgagcttgggtattgcacaagaaccccatagatgcgccaggaagtctcgttgtcctcagggtcttcggccgtcatcaactcacttgaagtgagctccgagtatgatttccgcgcgagtgccgacggatgcttggagcgtgatgtagccttggacccctgagtaccactagaaccctgagtggcagacgtgtctttcttgtttcccgtgcgacgcttcttcttcgacttcgagttggaaccctgaggttccttgcttgactcagaacgggggcgcttagcaggaggcttgacttccaggggttcttctaccccattgtcgtcctctgcgttgtcgtcgtcctctgcgtcgtcgtcgccctctgcggcctcgacgtcctccagagtttcaggggaacctcctcctcctcttcagagctactactagaggcgctctcctcaggttcctgggcgggaggctgatagtccgggtcgttctcgatgtcgtccaccgtggaatcggcgtcctcatcagggtacaccatgtgggtcatcgaggttcccccagggtggtggcacatcaccgcacctgtccagacgctcgtccgccgtttcgtagtaagcctcagggacgtatttgcgccagggagtccgatcgagacgacgccagtacatcatcctcacgagcatcttgatcagctgcggctgtcggaaatgcctgtgggccgcccggtcgctgccgatccactccatggctgtgtcgtacttgagcccagcaagaatagcctgacgcacgtctggccgaacttccttccagacgacacccccagggagcatcgtgtgtgcggcctccttggacaccacagtcttctcgccagcgcgacgcacagagtcgcggccaggctgatgatccttgggacgacgctggaccttgtgaacctgggggcttgcggagttcgactgcgtttttggcacctcagagtcccgtgattttctggagccttgaccgttcttggaaccctgagattttctggaatcctaagttttgcctccggccttcgcgccgctgcgagacttgctgccaggacccgtgagatccagaatttcaggacgacggacgacccagaccctgaagacggaggcatacgcgtgctcttctctggatacggggccgccgcagccttgcgcttgtccatggctgtgacgttgatgacagtgtcccaggattcaggaggcttcgagtccttgatgcagagattgaagaggtcgtggagacgctcccaattgcccgtgaagtctgtgtgctcctggaggaagtcagggaacttccaggggtccacggtggctaactcaagacgcgatttcaggattcgcacttgtgcctcagagtcggcaaggcgcgccttgagttgtgccttctcggactccagagaatcaatctcgtcttggtaccgcgtcttttgctcgcccagcgcgactttgtacttggattcagcatcatccaccttgcccagggcctcttggacctccaagaaccagtagtcgcacgtgaatttccaggtgcgcttcagttccttatacttgcgtcgcgtgtcgactacttcctgagtggcggtgaaaccctgctgagagtcagccagagaacgcatgtttcggtaggccccgaggactcgacgcaggtaaccagtcatcttgaacacgcgctcagcgagccttgtgctgttgaagtgacgcaggagtgaggccatctcgcgtcgaatgccgatggaattcagggtgttgtccaactcgaatgcggaaagaggcgaacgacgtggacacaggacgtcgatcccagcgttggcaccgcagacttccttcaacccctgaagattctcgtcggagagctcctcgaagccgatcagcgtagacgcgccgccgtagccttccatggcgaatgcacccgcgcgaatatcgttcacgatccctgggactcccacgagatatgcgttggtcttgagatccggcggggttggcagtgtccaatgcggtgggtgcacagggagtacgaagtcggggacatccacctcctgctgccgaagcatacccgcgaagacgagccccctgacgtcctccagcgtcgcgtgtcgtggtaacttgaactcaggggcatcctccaggttcacgtccgcagccgtgtcgcctgcgtctggagctttagactctgagttcgcgtcaccagtttcctgggctgcagcgtcagccgaggcagtgccatcggcctcgcgcatattcgcgtcagaggttttgcccgcgtcgccggagaaggagacgcgcttagtttcccccgtcctggtgacgcccgccgaagtgttgctggacgctgagttgcccgcctggtcgccgccgccgcccgctnnnnnnnnnnnnnnnnnnnnnnnnnnnnnnnnnnnnnnnnnnnnnnnnnnnnnnnnnnnnnnnnnnnnnnnnnnnnnnnnnnnnnnnnnnnnnnnnnnnnnnnnnnnnnnnnnnnnntgagatccggcggggttggcagtgtccaatgcggtgggtgcacagggagtacgaagtcggggacatccacctcctgctgccgaagcatacccgcgaagacgagccccctgacgtcctccagcgtcgcgtgtcgtggtaacttgaactcaggggcatcctccaggttcacgtccgcagccgtgtcgcctgcgtctggagctttagactctgagttcgcgtcaccagtttcctgggctgcagcgtcagccgaggcagtgccatcggcctcgcgcatattcgcgtcagaggttttgcccgcgtcgccggagaaggagacgcgcttagtttcccccgtcctggtgacgcccgccgaagtgttgctggacgctgagttgcccgcctggtcgccgccgccgcccgctggagcggtgttcgcaggagcgtcgccggtgcgctgctgcgtcggaggtggcgcgctgcaggggggcgccgtgccttgagctggcaccgtcgcttgcttgccgtccgaaggcacgctctccgccatgttgatgatctgtgaaatggcgatgtgaccgcgcattgcccgttggagtttttgcgtttgagaagagaaccttgaagataggtcctgaccaaccgttgggtagacagggtgtcgccaaagtgagtgaaatcctgggagtcgacagagtgcgacggccgtatcgaagtcgacggtggatcgccctctgtgtttgtgtggcctggccatgattcaccggttcggagttattgcctctttgatatacctggaccaggaggggcggttgacacgaggcggtccccagaaaatcgccgacgatgtgccgccaccctttggacttggagtttgtattggatgctgattggtggatgacttggatacggcgcggctgtacccgtgtgacatggatggcgactgtgggagagaagtgatttctcggggtgaatccagcgcctgaccacagatgggcccaactggctggatgtgtgaatcctgggagtgcacgcccaggatttcagagaacactcattccagccgcggactttcccttacgatgagtgcctaaagtctggtggaaagtgtctctggcgaatgtatcccagagtacacctcatcttgctgtggctcaagtagtatataacatcataaaatgaggttagtttttcccgaaatatgacattagcgagatttcttgttgaagctctacatcattagaatttcaagtgatataaagttgttcagacccggtttagatctcctacaagcaacgctaaaacgtggtaaagttccaaggtacccaccttcacaaatcaaaatccaaatatttgtcaaggtacctaccttcatgaaacgaaggcagttttttcgccaaggtacctaccttcataaaacgaagtcagtttttctcaaatttttaccaaggcatgaaagatctaaaaccgatagttaggagtttccttatagcagcgaccttttatagataaatggtttcgtaaccaatgcgatcttaagatctcgtgttcatgctagaagagtagggagtgctcattctgcattctaccaagtcaatcagcagtcaagatgaacccgtccaacctacagcaggagatggatgctctcaacactcgcggagcagagctcaagaagatgatcgatgacacgcatcccgtcgcccgcatcgcagaagagaaagcgaagaagtttgcgagcgactataaaggggttcaagcagaggaggctgagaagatagcggaggcgagtgctaaaactgaagaaaaggtgaggaagatgactgcaaaactcaaggcggccaaggaagaagcccagctgacgagtctaaagcgagaatggctcgtcaagcgggagaaggcgttcggtgacatggatcgtgcgcgcaaggagaatgtggatatatcaagcaagctgatagagctcgagcgtcagtacctgaacacccagcgccactaccaagagctacgcgatcaactccagacggtcaacggtgttgctgacatcaagctggagtagctgtagcaggcaatttgcaatgaattaggtaaaatattaaatgcggattttaccttaaaattttcaattatataaaagtgagtccatctcaagcgacgaaatgataaaatatataacatataatacgatgactgtgctttggcatggatgtaaaagctgtttaaggacgaattatggttgcgggcatcataagagaactatagctatgcaacgtactgtgagagcattaagagttcttaggatagcagatagggatggatcgtttcatgaactgatcgagctgttagtggacttctcaaggcgactagataataatgcagattggaaggaattatttaataagtgtgttccatacatgtggcaatatgaataatttataattttttggctcaaaatcgaaaatgcatttaattatcttcatttctgataattaatttccattagtatataacacaatatcacataatacaaaataattaattatggtttacgttcgcgaaaattatgagcttaacaaggaggcttttaaagcagctcagaagcgttactatctaaagaatagagagcagcgtctaactaatcaaaaggaatataatgagttgcacaaggaggagctagcgcaacgcagaaaaatcagaaaccaaaacaagaaactaaaatcgaaacttcccacgagaattgaggtttcgaacgaagtagagagtgaaaatgacaaagaagtgtaaaattatatattaatatttttttattttttataaatataaaagacccatcctgagagataaaatcttataaaatatagtagagcggatatacaacgacgatgtttggatatgaattagaaggacttaagcgacttggggttacatgtaccaagtggggtagtagtttccgtgttaaggtgcttggacgcaccaagaaaatggtttacatcagcaatgttggtaacccgaaaaatagagaattgattgctaagcagtacaaactatctatgaagaaactaaacactcatctgtcacctaactacaagggggacccttactaccggttttatcaaggtaaacttaaggaatcgcatctatatgagaatatttctccatcagaattgtatgataagctagagactattctcagctctcagttgaaggcgttcaagatcaatatcgctcttggatacgagttggagagtctcagtgacggtcagaaactatactggcatcctagtctatcgagcaccaacgtcttcgacaagcctatcacggttaacagtaaatctgacattcgcaagaaagtcattcctgaaatcagaacgatggagcgtgctgataggttaaaatacccaaaatctggctacaaattaaaggctatcacaggattcagagtatacaattataagcgtaactatacgctaggtgatagcgccgctgttattccgaaggagttccgcgatagtatacatattatcaatttccccaagacgaataataaatgtgtcttccactgtattgcttaccacggactaggaattgcaaaacaaaatcctagaacgattcaagtgcatgtgaaagctgctttcaagaagtattgcgagtttaaaaacattgaatacagtctcagcctgtttcgtagttttaaaccgattgatatcttccactttgacgagcttgaggagtgtttcaagcttgctatcaatgtatacagcaaggatgtatccagcggtgaagttaaatgcgagcgcgaatcagagaaggcgtacaacgttctaaacatcctatcacacagcaaccgcgcgttgtacatcaataatatggataagttcatgagtaaatatttatgctcaaaatgtgaaatgatttttgcgacctctacgaagctgaacgaccatcaaaagaatcaatgtgataaaacaaatattatgtcatttgctaagcaaccaacgatctaccagcctggcaaaaactttgcatttcaaatgatgcagaaatataaagttcacgacgctactccttataacgaccatttcatcgtatatgactttgaatctatcttgaagccaactaacattcagtcaggagagaatactgtcttcatgaatgagcatattcctgtcagtgtttcaattcttaatacgttgacgaattcatatttctgtattgtagaagaaaccctacctccagaatagttcgtccctcccattttttaccatgcctgtggtgaatgggggactcgacactaccactgtggagttcaatcttactggggcaagcccccacgctcgcgtggaactagaccaagatgtgctaaaccagactttacttccgccacagcacgttgagatgaaccacatgaacacgtaccagcctactcatgcgccgccaagatcctgggggtatgcaaacagaaagccattttaattggtttagatactgcatttatatatacttcattgattagttcttattgaaatctattgattgacttggtactaaaccgcgagcaagtgttatgcaatatgcttgttctcatgttgctcctatcttggtcacacacataatgcatactgttcgactgatcgaagtgcggtgctatctctgcttcaatgtcggtgtgcgaagacaacatcaacttactctgtacttgctcttcttcttttgcattgtttggtggcgttggagcgcgctgtttgtaatgtagtgggggtcctagagggcttatcacttgtagcaaccatcaaggcgacgataccatagcatccattatgttacatgtaagatagagcggaatgtgtacccgttcaggcgcaacgtttctctaaatatcagtattgcatagaatgcactgtgagcagctcatcggaggatttttatccgcagatcacaccagtcccttcaagtggaataattaccagggagcttagcaacaaactgtgtgaagaaaagccaaatttattctcgcgttcactatgtcatactgagtctcatacgatttcttatgccgtccgggacggtttaagcgtttttttataccgtccatgtcacccctccgcgtccaaggggttaagagcgacccggagatcaaagtatcttccaccaagcgtatccctaacgttatcgatctaaatcagggttcgtatcaaaatggagttatcactattgatgccacggctcaacttaatggttcggaaggattcgcgtgccttcgtgatgcttgcattatgctaccgtacaaggtttcgatgaagaatggtgccactgcacaaacggctgccgcaaatcgtttctgcgccactcttaattgtggtaatttcaatgtaattgactcgatgtcgttggagttaaatggtaagactattatttcgatggcggactacaagttattctggaataatgttcgtgctcagacaggatacagtcctcagtacgttgagaagcatggtgcagagtcgttcctataccctgatgctgctcagtcggtatcgtacagttctggttccgcttctactagtggtgatggatattctaacactatggctttctcgtcatcgtttagtacttccgctcctcctggtggtgcaactatccctaatgacggcttcgttaagcgtctactatcgaatcctccgacagcaggcgctgatttctctagcagttggccttcggtaggtgctgcttctgcttctactaccatttccaatcaaacggctcgtggtgcttttgttgctggcgcatctactgctaacgctatcatgggtacgtggaactacatgctctagattaaattaactgatctccacccgattttccgtgagctcgatttaatggctaaccctcagattcggcttcgtttccgcgagaatcaggattcgtctgctatcgctgttggtgctaccaagggtatgtcacttacttcgaccactctgtcatccggcaatacttgtccggtaatggttgcaagctctgctagtggtaatccgctgaatggtgtacttgccgcttctgcaggcttcagtgttgcttggggtgctgttgttaactctcgtgagcctatgattgatggtacttacatgccttttactacagctcgtctatatgtaccgttcgtcaaccttgaaaaccctcaagctatcatctctaaaccagttaagaaggttcgctacaatgattgctatgctcagtggttctaccaacgcgccggcattcgtaagcaatcgactcagcttaatgcatcgtttgatcttcagctatcggcttcggttaaaaatgctaagtatatcgtagtattaccattcgctgaacaaactaacaacttcgcatctgctggtgttccacagttccagagcccattcgattccgccccatggacgcttcaacctggatcttcgattcgaaactttaatattcgcattggttcatctcagacgtttgatctcaatcatgagtatatgtatgcagtactgcttgcggaacaaaggcgaataagaacagaacgagaacaagcttcggatagcaataagcgcagacacaatgacgaagataaccagccgagtcggaaacgtcgtaaagttgatagacagcgggaagcagagtatcaacgccttcaccggcttcgaaaccaagcatgaagagacgagactgcgttttatacctccgcggagctcgatgcaatggatagcactttaaacattaaggaaccaaccgaggtagacctagnnnnnnnnnnnnnnnnnnnnnnnnnnnnnnnnnnnnnnnnnnnnnnnnnnnnnnnnnnnnnnnnnnnnnnnnnnnnnnnnnnnnnnnnnnnnnnnnnnnnnnnnnnnnnnnnnnnnnnnnnnnnnnnnnnnnnnnnnnnnnnnnnnnnnnnnnnnnnnnnnnnnnnnnnnnnnnnnnnnnnnnnnnnnnnnnnnnnnnnnnnnnnnnnnnnnnnnnnnnnnnnnnnnnnnnnnnnnnnnnnnnnnnnnnnnnnnnnnnnnnnnnnnnnnnnnnnnnnnnnnnnnnnnnnnnnnnnnnnnnnnnnnnnnnnnnnnnnnnnnnnnnnnnnnnnnnnnnnnnnnnnnnnnnnnnnnnnnnnnnnnnnnnnnnnnnnnnnnnnnnnnnnnnnnnnnnnnnnnnnnnnnnnnnnnnnnnnnnnnnnnnnnnnnnnnnnnnnnnnnnnnnnnnnnnnnnnnnnnnnnnnnnnnnnnnnnnnnnnnnnnnnnnnnnnnnnnnnnnnnnnnnnnnnnnnnnnnnnnnnnnnnnnnnnnnnnnnnnnnnnnnnnnnnnnnnnnnnnnnnnnnnnnnnnnnnnnnnnnnnnnnnnnnnnnnnnnnnnnnnnnnnnnnnnnnnnnnnnnnnnnnnnnnnnnnnnnnnnnnnnnnnnnnnnnnnnnnnnnnnnnnnnnnnnnnnnnnnnnnnnnnnnnnnnnnnnnnnnnnnnnnnnnnnnnnnnnnnnnnnnnnnnnnnnnnnnnnnnnnnnnnnnnnnnnnnnnnnnnnnnnnnnnnnnnnnnnnnnnnnnnnnnnnnnnnnnnnnnnnnnnnnnnnnnnnnnnnnnnnnnnnnnnnnnnnnnnnnnnnnnnnnnnnnnnnnnnnnnnnnnnnnnnnnnnnnnnnnnnnnnnnnnnnnnnnnnnnnnnnnnnnnnnnnnnnnnnnnnnnnnnnnnnnnnnnnnnnnnnnnnnnnnnnnnnnnnnnnnnnnnnnnnnnnnnnnnnnnnnnnnnnnnnnnnnnnnnnnnnnnnnnnnnnnnnnnnnnnnnnnnnnnnnnnnnnnnnnnnnnnnnnnnnnnnnnnnnnnnnnnnnnnnnnnnnnnnnnnnnnnnnnnnnnnnnnnnnnnnnnnnnnnnnnnnnnnnnnnnnnnnnnnnnnnnnnnnnnnnnnnnnnnnnnnnnnnnnnnnnnnnnnnnnnnnnnnnnnnnnnnnnnnnnnnnnnnnnnnnnnnnnnnnnnnnnnnnnnnnnnnnnnnnnnnnnnnnnnnnnnnnnnnnnnnnnnnnnnnnnnnnnnnnnnnnnnnnnnnnnnnnnnnnnnnnnnnnnnnnnnnnnnnnnnnnnnnnnnnnnnnnnnnnnnnnnnnnnnnnnnnnnnnnnnnnnnnnnnnnnnnnnnnnnnnnnnnnnnnnnnnnnnnnnnnnnnnnnnnnnnnnnnnnnnnnnnnnnnnnnnnnnnnnnnnnnnnnnnnnnnnnnnnnnnnnnnnnnnnnnnnnnnnnnnnnnnnnnnnnnnnnnnnnnnnnnnnnnnnnnnnnnnnnnnnnnnnnnnnnnnnnnnnnnnnnnnnnnnnnnnnnnnnnnnnnnnnnnnnnnnnnnnnnnnnnnnnnnnnnnnnnnnnnnnnnnnnnnnnnnnnnnnnnnnnnnnnnnnnnnnnnnnnnnnnnnnnnnnnnnnnnnnnnnnnnnnnnnnnnnnnnnnnnnnnnnnnnnnnnnnnnnnnnnnnnnnnnnnnnnnnnnnnnnnnnnnnnnnnnnnnnnnnnnnnnnnnnnnnnnnnnnnnnnnnnnnnnnnnnnnnnnnnnnnnnnnnnnnnnnnnnnnnnnnnnnnnnnnnnnnnnnnnnnnnnnnnnnnnnnnnnnnnnnnnnnnnnnnnnnnnnnnnnnnnnnnnnnnnnnnnnnnnnnnnnnnnnnnnnnnnnnnnnnnnnnnnnnnnnnnnnnnnnnnnnnnnnnnnnnnnnnnnnnnnnnnnnnnnnnnnnnnnnnnnnnnnnnnnnnnnnnnnnnnnnnnnnnnnnnnnnnnnnnnnnnnnnnnnnnnnnnnnnnnnnnnnnnnnnnnnnnnnnnnnnnnnnnnnnnnnnnnnnnnnnnnnnnnnnnnnnnnnnnnnnnnnnnnnnnnnnnnnnnnnnnnnnnnnnnnnnnnnnnnnnnnnnnnnnnnnnnnnnnnnnnnnnnnnnnnnnnnnnnnnnnnnnnnnnnnnnnnnnnnnnnnnnnnnnnnnnnnnnnnnnnnnnnnnnnnnnnnnnnnnnnnnnnnnnnnnnnnnnnnnnnnnnnnnnnnnnnnnnnnnnnnnnnnnnnnnnnnnnnnnnnnnnnnnnnnnnnnnnnnnnnnnnagttcgtcaatttgcaatagtgtcagccttctcctgcacagctgaaaaactacaagggaaaacctgcaaggatggcgttacggtaacgcccttagaaagaccaggaatgccacatcaactctctatgttgcactatcacgaacgacatcactgcaaaatctaacacttaccgaagatatcacacaagaatacatgcagcagttccaacctcctcgtacgtatgtagccgaaatgctacggctccaagctctcatagatgtgccaccatatattccttctgaagagctcttaaaattcagtatctggctggagaaaaacaacatacatacagcaacttgaaaaaatagccgaatattaaaaatggacccactcgatcccgatctggaaagcgtaccagcgttgaagtcggcgtctttgctgttgtgaggggccgctactaatctgccatggatgtctgccgcgcgcaggctccaagatttgccataatgatcaccacctgcccccaagcttcggaacatacccaccaagcctccgagtccactccgacccaaaagacatccagcaggccttcggggtcagtcacggggtcattttatgtgacgtggacgtccgtctgccaatgagatggcagaggactcccacgtcaagtgctgctgcacagcacttcagtttacgctggacagcgtaatacggggatgcatggtttatattcattatatgctatcctattggctggtgtcaaaagtaaacttgattatgagacgcgtaaacatggacattcgcgcgacctcattggctgtaaatcctcgagatgtgcaacaatcaagttttccagccggacttttgattatgggacgcaagtcacaaattttggccaagctacgaataggattagtattttttcattggtagaaaaggattgatctaggatttgagattgatagactttaggatgggacctggatacttgtttgcgtgtcctggtcgccaagaactactggttgcgcggcggcggcgcgccgacgctaaactaacggatcaatcaatcacttttcaactttccaacttcctctcaaatgttcttcgagcgctcgccactgcgctcatcaagcttcgggtcttcgcatcggcttgtgtgacatagtagcacttgtcgtgtcaagcttcggttcaagttcaagactaggttgctcgtggggataccttccgaagcgagtttacctgtgactattggagttagccacatagtggggacactctaggttgcgaacgtgcagttttctgtgggagcacacttcgaagaagtgggtacatcacgccgtgggcaggtggaaataccacattggggcttggcccacgccaagaccggatagtacctaaccttcggggttgtgttggactcttactagaagtcggtttagtaacagggcgcctgctttgtgtctgctaacgtggaacattgtagaagtataacggtccctggttagtcccttgcctttttcgatctttggagtcggtccatggcccggtacaaaaagggtcataaccacagcagtaagaggaagcaccaaaaagcgcgtgacgttaaagtatcatcaacgtctacgccggctcctcctcctgttacggctattgacaccgatctcttcttctcgccggtcgaggcggagaaatctgcgaaattgcaatcggatcttctcaagcaggtcaaaaccgctaagaggatcctggttaagttccgcaaagatgtctggggtatcaaggacgacagcgttgagggtaaggttgatcggcaactcaacttagctcttctcgaccttaagagctgcgaggacaacattgctgcgaagattaacgggcttatccgcctaaaacctcagaaacactaagctttaaacacacttttagcttcacttcgtctccgttttattgtaccgttttacggatcactcaccgaaaagtccatctgctcgagacctaatgcctgtgacaaggagtagggcgggtgagagtgaatggcctaacccgcggcagcgtcaagtgccgcggacggctcaaacggaggcggcaacgccacaagaagcgcaaagtgaagccccatcagcggggacgacaacccctgcgcctgagtcaatgtcgatgcagcagttgatgttgtggattgcacagcagcagcaaatgtatcagaatcagatgcagacccagttgcagatgcaaatgcaacaggccaacagtcgttttcagcaactactggcctcgcaaggtgaacgacggaagaaggatcctcccacgtatgaagggaaatttggcgaagacctggaactttggatctttgctacggaggagtactacgctaacaaacgaggaataatggatgccgatacgtccgattttgtgaccatgatatcaagcagtttaggcaagtctgtgctgaactggtatcgtgccttttcgtcggattgtgatgcggcgggaatgccgaaatcatggcaactgtttaaggcacagttgcgcgagcgctttcgcccgaaagactttgaatacaacctgcgtgagcggttgtttcaactgaaacaacacggaactatccatgaatacgtgtcgtcgtttcaggatttgatgtctcaatccgagttagacatttcggaaatggagaagcgtttctacttccagtatgggcttcgtgcggagacgtcaaagaaggtgaaggaactcagtccaaggttcttacatgaggtcattgagattgcaacgaactttgagtttgctcactatggagggctatcggtaaaacctgcagtgagtcatcagccttcgtcgaaagcagtttcgtctgtgaaacctgcggctaacagtacggccaagccacatgaacgaaagccaccttcgaagcgtgggccgaaagaggattggcgaaagtcagccacatgtaacaactgtggacaattcggccatatcaagccacaatgtacgtccaccaaggagatgagccattatgttggcggatcattctatgctattttggaagtaaacgctttagccttcaagcaggatgagacccccgcagaagtttcgatcttcgtcgacaatggcagcagcctcaacggtgtcacggaagcgttagccgagcgactacaattggaaatcacggagcatcccgacgacatgatgacagttcgtctgggatacaaccaaaccgtgcaatgaccaagacgtaccgtcgaaatgatgctacagattccgaatttccccgtgacgtgcgagacttttacggtcatgcctgttccagaagacaaggacgtgctcctcggaatgaagtggcttcgggagaataaccctgacatcgactgggaacgcttactactgcgtccacgtaataggaccgaggaacccccggcccatcagttggtggtatctaaccgacctcccgcacgtatgattggaggccgtcgtttcaagaatgcaaaccagaaccgtgaaatattccattactaccggcagcatggccacaccggtgcgttcggagaaacgaagctgatctcaacgaagcaatttatgaaagaacttcgcaaagggaagggtattgaagctgtttttgttgtaaacccgcacgactcagaaaaggctgagcgttttaagcaacaaggatgggaggcgctagtggacaatccggcatatgatgttttgctcaagtaccgcgatactgtgtttcgcactgagctgccgagtaccacacctcctgtccgcgaagggattgagcacgaaattcagcttcagccgggaacgcaaccgatttcggtgaaacagtggcgccaaagcccagagcagcgcaaggtcatccaagattggacgaaggagatggtacaggctggaatcattcgccctagcacctcggcattcagtgccccaactttttgtgtcaagaaacccgtgggttggcgtattgtgcacgactatcgccagctcaacagctctaccattttgccggccatacccatgccgaggaaggaagacacattcgacgcaatgggggtagttactggttctcctgcatggacctcttgtggggatattaccaggttaaacttcgtgaatctgacattccatttactgctttttcgacgcccgatgggctgtttgagtatcttgtcacccctatgggtttgagcggtagtcctggcacttttaaccggttgttacggcgggtgtttagcgacctacgcgatgtcatgcgcatctactttgatgacatctatgttttcactcaagacacagatgttcggacgcatgtcgaagcgttggacagagtactccaacgctgtcaagagcagcagctgtatgtcaagttgtcaaagtgccagttttgtgtcgaagagatcccttgtcttggtgattttgtgggccgcaatggtgttcgaatggaccctgacaaagtgcgtgtgattcgcgagtggtcgattccacggacaaagaagcaaatggaaagcttcttgggtactacggtctatgtctcgcgcttttgcggcgacttcgcgcaattcgcaggaccattgcatgaaagtactaagggtttgcgcccaaaggaaacgctgcatttgtctgagcaccagttggaatgttttcatgaactcaagcgccgtctctccacccctcccgtgttgcaacttcctgatttcgaaaaaccgttcggtattcgtatggatgcctcgaactttgccatagggggagtcttgttccaaaacgagggagggctcgagcatccgatcgcattcactggtcgtgaaatgaaaccagcggagctaaactacccagtgcgcgaacaggaattgccggctattatgcatgcgcttcgggtgtggagagtctacctgctcgatcggccatttacggtggagacagaccacaagagtattgagactatattgacgcagaagacaacaaaccgtcgtgtggctcgctggtttaatgaactagccgaccaaccacagttcaaatggattccaggcgacagtaaccaatgcagtgtctcgaaacccactctttgagcacaaagccgctcaggttagtctcattgagctcattgaagcggctcgaaaccgtgaaattgtagctagcgtccaaacgaccagtgcaactgtgacgcactcggccaaacaactgtaccctacagatcgaagagttcaggagctgttgcagagtatcgctagtggtaaagaggtaccacgctactctgtgaagaatggactgctgtattaccaaacgagagatgatgaaaatgcacgactggtaattccggacaatgaagatctgaagaaccgtgttatttgtgaaaaccacgatgtggtcacggcaggtcaccccggatacttcaagacatacttaggcatccagaagaaatattactggcccaagatgtcgaagtacattcagcgttatgtgaacacgtgcgagctttgtcagcgaaacaaggcacgccaaacgaagccgccgggactacttcaaccgttggagattccaggaggcagatggattgatgtgacgatggacttcatggttgcactaccgaagacggcagccggaaaagacgccattatggttattgtggaccggttgacgaaacgtgctaagttcattgccacgaacacggcggcgacagcagaagagactgctgcgctattcatggccaattatgtgaaagaccatggagtgccgaagtcgatcgtctcagaccgtgacatcaaagttctggcaggaggtgattaagacattagagacgactcataacttgtcgtccgccttccgcccgcaaacggatggtcagaccgagcgtactaatcggtttattgaagactatctacgaggtgtcgtgaacccattccagaatgattgggatgaatacctacatctcgccgaattcgcgtacaacagacgtgtccattcctcgatcggtatgtcaccgtttgaggctgatctgggttatgtgccctatatgccagatgaggtggctggggaccaagagtttgagcagttgcagaagtcagcacaagatttcctgctcaagcaagacgcaattttgaaaatggcacaagacgcgatgagtgaggcgcaaactcgaatgaagtcgtatcatgacaagaacagacttgctcaagacttcaaacccgggaatatggtacttttggatggacggaacttggacattcgtcacaaggggtttgcacaggcgaagaaacttgcgccaaggtttattggtccttacccggtcgtgaagcaagttcatcacgactcctacgagctgaagttgtcgaaggagctcaagttgcatcccgttttccacacttcgttgctcaagccgtatcgcagcgacaaatcacgcagccaaaatgttaacaaggtgatcttgaatgatggctcagagggacaacttgtacgtgaagtcatcggccaccgtcgcaggaagaagacgctccaatatcaaatttggtggcttggtgaaccccgagaagacgctacatgggaacccgtagagaacctgaatcagattccagggctcattgacaagtactgggactccaagaagaagtaaagtgcagcttcaaagtagtggggccttcttggaagggaggtcatgtgacgtggacgtccgtctgccaatgagatggcagaggactcccacgtcaagtgctgctgcacagcacttcagtttgcgctggacagcgtaatacggggatgcatggtttatattcattatatgctatcctattggctggtgtcaaaannnnnnnnnnnnnnnnnnnnnnnnnnnnnnnnnnnnnnnnnnnnnnnnnnnnnnnnnnnnnnnnnnnnnnnnnnnnnnnnnnnnnnnnnnnnnnnnnnnnnnnnnnnnnnnnnnnnnnnnnnnnnnnnnnnnnnnnnnnnnnnnnnnnnnnnnnnnnnnnnnnnnnnnnnnnnnnnnnnnnnnnnnnnnnnnnnnnnnnnnnnnnnnnnnnnnnnnnnnnnnnnnnnnnnnnnnnnnnnnnnnnnnnnnnnnnnnnnnnnnnnnnnnnnnnnnnnnnnnnnnnnnnnnnnnnnnnnnnnnnnnnnnnnnnnnnnnnnnnnnnnnnnnnnnnnnnnnnnnnnnnnnnnnnnnnnnnnnnnnnnnnnnnnnnnnnnnnnnnnnnnnnnnnnnnnnnnnnnnnnnnnnnnnnnnnnnnnnnnnnnnnnnnnnnnnnnnnnnnnnnnnnnnnnnnnnnnnnnnnnnnnnnnnnnnnnnnnnnnnnnnnnnnnnnnnnnnnnnnnnnnnnnnnnnnnnnnnnnnnnnnnnnnnnnnnnnnnnnnnnnnnnnnnnnnnnnnnnnnnnnnnnnnnnnnnnnnnnnnnnnnnnnnnnnnnnnnnnnnnnnnnnnnnnnnnnnnnnnnnnnnnnnnnnnnnnnnnnnnnnnnnnnnnnnnnnnnnnnnnnnnnnnnnnnnnnnnnnnnnnnnnnnnnnnnnnnnnnnnnnnnnnnnnnnnnnnnnnnnnnnnnnnnnnnnnnnnnnnnnnnnnnnnnnnnnnnnnnnnnnnnnnnnnnnnnnnnnnnnnnnnnnnnnnnnnnnnnnnnnnnnnnnnnnnnnnnnnnnnnnnnnnnnnnnnnnnnnnnnnnnnnnnnnnnnnnnnnnnnnnnnnnnnnnnnnnnnnnnnnnnnnnnnnnnnnnnnnnnnnnnnnnnnnnnnnnnnnnnnnnnnnnnnnnnnnnnnnnnnnnnnnnnnnnnnnnnnnnnnnnnnnnnnnnnnnnnnnnnnnnnnnnnnnnnnnnnnnnnnnnnnnnnnnnnnnnnnnnnnnnnnnnnnnnnnnnnnnnnnnnnnnnnnnnnnnnnnnnnnnnnnnnnnnnnnnnnnnnnnnnnnnnnnnnnnnnnnnnnnnnnnnnnnnnnnnnnnnnnnnnnnnnnnnnnnnnnnnnnnnnnnnnnnnnnnnnnnnnnnnnnnnnnnnnnnnnnnnnnnnnnnnnnnnnnnnnnnnnnnnnnnnnnnnnnnnnnnnnnnnnnnnnnnnnnnnnnnnnnnnnnnnnnnnnnnnnnnnnnnnnnnnnnnnnnnnnnnnnnnnnnnnnnnnnnnnnnnnnnnnnnnnnnnnnnnnnnnnnnnnnnnnnnnnnnnnnnnnnnnnnnnnnnnnnnnnnnnnnnnnnnnnnnnnnnnnnnnnnnnnnnnnnnnnnnnnnnnnnnnnnnnnnnnnnnnnnnnnnnnnnnnnnnnnnnnnnnnnnnnnnnnnnnnnnnnnnnnnnnnnnnnnnnnnnnnnnnnnnnnnnnnnnnnnnnnnnnnnnnnnnnnnnnnnnnnnnnnnnnnnnnnnnnnnnnnnnnnnnnnnnnnnnnnnnnnnnnnnnnnnnnnnnnnnnnnnnnnnnnnnnnnnnnnnnnnnnnnnnnnnnnnnnnnnnnnnnnnnnnnnnnnnnnnnnnnnnnnnnnnnnnnnnnnnnnnnnnnnnnnnnnnnnnnnnnnnnnnnnnnnnnnnnnnnnnnnnnnnnnnnnnnnnnnnnnnnnnnnnnnnnnnnnnnnnnnnnnnnnnnnnnnnnnnnnnnnnnnnnnnnnnnnnnnnnnnnnnnnnnnnnnnnnnnnnnnnnnnnnnnnnnnnnnnnnnnnnnnnnnnnnnnnnnnnnnnnnnnnnnnnnnnnnnnnnnnnnnnnnnnnnnnnnnnnnnnnnnnnnnnnnnnnnnnnnnnnnnnnnnnnnnnnnnnnnnnnnnnnnnnnnnnnnnnnnnnnnnnnnnnnnnnnnnnnnnnnnnnnnnnnnnnnnnnnnnnnnnnnnnnnnnnnnnnnnnnnnnnnnnnnnnnnnnnnnnnnnnnnnnnnnnnnnnnnnnnnnnnnnnnnnnnnnnnnnnnnnnnnnnnnnnnnnnnnnnnnnnnnnnnnnnnnnnnnnnnnnnnnnnnnnnnnnnnnnnnnnnnnnnnnnnnnnnnnnnnnnnnnnnnnnnnnnnnnnnnnnnnnnnnnnnnnnnnnnnnnnnnnnnnnnnnnnnnnnnnnnnnnnnnnnnnnnnnnnnnnnnnnnnnnnnnnnnnnnnnnnnnnnnnnnnnnnnnnnnnnnnnnnnnnnnnnnnnnnnnnnnnnnnnnnnnnnnnnnnnnnnnnnnnnnnnnnnnnnnnnnnnnnnnnnnnnnnnnnnnnnnnnnnnnnnnnnnnnnnnnnnnnnnnnnnnnnnnnnnnnnnnnnnnnnnnnnnnnnnnnnnnnnnnnnnnnnnnnnnnnnnnnnnnnnnnnnnnnnnnnnnnnnnnnnnnnnnnnnnnnnnnnnnnnnnnnnnnnnnnnnnnnnnnnnnnnnnnnnnnnnnnnnnnnnnnnnnnnnnnnnnnnnnnnnnnnnnnnnnnnnnnnnnnnnnnnnnnnnnnnnnnnnnnnnnnnnnnnnnnnnnnnnnnnnnnnnnnnnnnnnnnnnnnnnnnnnnnnnnnnnnnnnnnnnnnnnnnnnnnnnnnnnnnnnnnnnnnnnnnnnnnnnnnnnnnnnnnnnnnnnnnnnnnnnnnnnnnnnnnnnnnnnnnnnnnnnnnnnnnnnnnnnnnnnnnnnnnnnnnnnnnnnnnnnnnnnnnnnnnnnnnnnnnnnnnnnnnnnnnnnnnnnnnnnnnnnnnnnnnnnnnnnnnnnnnnnnnnnnnnnnnnnnnnnnnnnnnnnnnnnnnnnnnnnnnnnnnnnnnnnnnnnnnnnnnnnnnnnnnnnnnnnnnnnnnnnnnnnnnnnnnnnnnnnnnnnnnnnnnnnnnnnnnnnnnnnnnnnnnnnnnnnnnnnnnnnnnnnnnnnnnnnnnnnnnnnnnnnnnnnnnnnnnnnnnnnnnnnnnnnnnnnnnnnnnnnnnnnnnnnnnnnnnnnnnnnnnnnnnnnnnnnnnnnnnnnnnnnnnnnnnnnnnnnnnnnnnnnnnnnnnnnnnnnnnnnnnnnnnnnnnnnnnnnnnnnnnnnnnnnnnnnnnnnnnnnnnnnnnnnnnnnnnnnnnnnnnnnnnnnnnnnnnnnnnnnnnnnnnnnnnnnnnnnnnnnnnnnnnnnnnnnnnnnnnnnnnnnnnnnnnnnnnnnnnnnnnnnnnnnnnnnnnnnnnnnnnnnnnnnnnnnnnnnnnnnnnnnnnnnnnnnnnnnnnnnnnnnnnnnnnnnnnnnnnnnnnnnnnnnnnnnnnnnnnnnnnnnnnnnnnnnnnnnnnnnnnnnnnnnnnnnnnnnnnnnnnnnnnnnnnnnnnnnnnnnnnnnnnnnnnnnnnnnnnnnnnnnnnnnnnnnnnnnnnnnnnnnnnnnnnnnnnnnnnnnnnnnnnnnnnnnnnnnnnnnnnnnnnnnnnnnnnnnnnnnnnnnnnnnnnnnnnnnnnnnnnnnnnnnnnnnnnnnnnnnnnnnnnnnnnnnnnnnnnnnnnnnnnnnnnnnnnnnnnnnnnnnnnnnnnnnnnnnnnnnnnnnnnnnnnnnnnnnnnnnnnnnnnnnnnnnnnnnnnnnnnnnnnnnnnnnnnnnnnnnnnnnnnnnnnnnnnnnnnnnnnnnnnnnnnnnnnnnnnnnnnnnnnnnnnnnnnnnnnnnnnnnnnnnnnnnnnnnnnnnnnnnnnnnnnnnnnnnnnnnnnnnnnnnnnnnnnnnnnnnnnnnnnnnnnnnnnnnnnnnnnnnnnnnnnnnnnnnnnnnnnnnnnnnnnnnnnnnnnnnnnnnnnnnnnnnnnnnnnnnnnnnnnnnnnnnnnnnnnnnnnnnnnnnnnnnnnnnnnnnnnnnnnnnnnnnnnnnnnnnnnnnnnnnnnnnnnnnnnnnnnnnnnnnnnnnnnnnnnnnnnnnnnnnnnnnnnnnnnnnnnnnnnnnnnnnnnnnnnnnnnnnnnnnnnnnnnnnnnnnnnnnnnnnnnnnnnnnnnnnnnnnnnnnnnnnnnnnnnnnnnnnnnnnnnnnnnnnnnnnnnnnnnnnnnnnnnnnnnnnnnnnnnnnnnnnnnnnnnnnnnnnnnnnnnnnnnnnnnnnnnnnnnnnnnnnnnnnnnnnnnnnnnnnnnnnnnnnnnnnnnnnnnnnnnnnnnnnnnnnnnnnnnnnnnnnnnnnnnnnnnnnnnnnnnnnnnnnnnnnnnnnnnnnnnnnnnnnnnnnnnnnnnnnnnnnnnnnnnnnnnnnnnnnnnnnnnnnnnnnnnnnnnnnnnnnnnnnnnnnnnnnnnnnnnnnnnnnnnnnnnnnnnnnnnnnnnnnnnnnnnnnnnnnnnnnnnnnnnnnnnnnnnnnnnnnnnnnnnnnnnnnnnnnnnnnnnnnnnnnnnnnnnnnnnnnnnnnnnnnnnnnnnnnnnnnnnnnnnnnnnnnnnnnnnnnnnnnnnnnnnnnnnnnnnnnnnnnnnnnnnnnnnnnnnnnnnnnnnnnnnnnnnnnnnnnnnnnnnnnnnnnnnnnnnnnnnnnnnnnnnnnnnnnnnnnnnnnnnnnnnnnnnnnnnnnnnnnnnnnnnnnnnnnnnnnnnnnnnnnnnnnnnnnnnnnnnnnnnnnnnnnnnnnnnnnnnnnnnnnnnnnnnnnnnnnnnnnnnnnnnnnnnnnnnnnnnnnnnnnnnnnnnnnnnnnnnnnnnnnnnnnnnnnnnnnnnnnnnnnnnnnnnnnnnnnnnnnnnnnnnnnnnnnnnnnnnnnnnnnnnnnnnnnnnnnnnnnnnnnnnnnnnnnnnnnnnnnnnnnnnnnnnnnnnnnnnnnnnnnnnnnnnnnnnnnnnnnnnnnnnnnnnnnnnnnnnnnnnnnnnnnnnnnnnnnnnnnnnnnnnnnnnnnnnnnnnnnnnnnnnnnnnnnnnnnnnnnnnnnnnnnnnnnnnnnnnnnnnnnnnnnnnnnnnnnnnnnnnnnnnnnnnnnnnnnnnnnnnnnnnnnnnnnnnnnnnnnnnnnnnnnnnnnnnnnnnnnnnnnnnnnnnnnnnnnnnnnnnnnnnnnnnnnnnnnnnnnnnnnnnnnnnnnnnnnnnnnnnnnnnnnnnnnnnnnnnnnnnnnnnnnnnnnnnnnnnnnnnnnnnnnnnnnnnnnnnnnnnnnnnnnnnnnnnnnnnnnnnnnnnnnnnnnnnnnnnnnnnnnnnnnnnnnnnnnnnnnnnnnnnnnnnnnnnnnnnnnnnnnnnnnnnnnnnnnnnnnnnnnnnnnnnnnnnnnnnnnnnnnnnnnnnnnnnnnnnnnnnnnnnnnnnnnnnnnnnnnnnnnnnnnnnnnnnnnnnnnnnnnnnnnnnnnnnnnnnnnnnnnnnnnnnnnnnnnnnnnnnnnnnnnnnnnnnnnnnnnnnnnnnnnnnnnnnnnnnnnnnnnnnnnnnnnnnnnnnnnnnnnnnnnnnnnnnnnnnnnnnnnnnnnnnnnnnnnnnnnnnnnnnnnnnnnnnnnnnnnnnnnnnnnnnnnnnnnnnnnnnnnnnnnnnnnnnnnnnnnnnnnnnnnnnnnnnnnnnnnnnnnnnnnnnnnnnnnnnnnnnnnnnnnnnnnnnnnnnnnnnnnnnnnnnnnnnnnnnnnnnnnnnnnnnnnnnnnnnnnnnnnnnnnnnnnnnnnnnnnnnnnnnnnnnnnnnnnnnnnnnnnnnnnnnnnnnnnnnnnnnnnnnnnnnnnnnnnnnnnnnnnnnnnnnnnnnnnnnnnnnnnnnnnnnnnnnnnnnnnnnnnnnnnnnnnnnnnnnnnnnnnnnnnnnnnnnnnnnnnnnnnnnnnnnnnnnnnnnnnnnnnnnnnnnnnnnnnnnnnnnnnnnnnnnnnnnnnnnnnnnnnnnnnnnnnnnnnnnnnnnnnnnnnnnnnnnnnnnnnnnnnnnnnnnnnnnnnnnnnnnnnnnnnnnnnnnnnnnnnnnnnnnnnnnnnnnnnnnnnnnnnnnnnnnnnnnnnnnnnnnnnnnnnnnnnnnnnnnnnnnnnnnnnnnnnnnnnnnnnnnnnnnnnnnnnnnnnnnnnnnnnnnnnnnnnnnnnnnnnnnnnnnnnnnnnnnnnnnnnnnnnnnnnnnnnnnnnnnnnnnnnnnnnnnnnnnnnnnnnnnnnnnnnnnnnnnnnnnnnnnnnnnnnnnnnnnnnnnnnnnnnnnnnnnnnnnnnnnnnnnnnnnnnnnnnnnnnnnnnnnnnnnnnnnnnnnnnnnnnnnnnnnnnnnnnnnnnnnnnnnnnnnnnnnnnnnnnnnnnnnnnnnnnnnnnnnnnnnnnnnnnnnnnnnnnnnnnnnnnnnnnnnnnnnnnnnnnnnnnnnnnnnnnnnnnnnnnnnnnnnnnnnnnnnnnnnnnnnnnnnnnnnnnnnnnnnnnnnnnnnnnnnnnnnnnnnnnnnnnnnnnnnnnnnnnnnnnnnnnnnnnnnnnnnnnnnnnnnnnnnnnnnnnnnnnnnnnnnnnnnnnnnnnnnnnnnnnnnnnnnnnnnnnnnnnnnnnnnnnnnnnnnnnnnnnnnnnnnnnnnnnnnnnnnnnnnnnnnnnnnnnnnnnnnnnnnnnnnnnnnnnnnnnnnnnnnnnnnnnnnnnnnnnnnnnnnnnnnnnnnnnnnnnnnnnnnnnnnnnnnnnnnnnnnnnnnnnnnnnnnnnnnnnnnnnnnnnnnnnnnnnnnnnnnnnnnnnnnnnnnnnnnnnnnnnnnnnnnnnnnnnnnnnnnnnnnnnnnnnnnnnnnnnnnnnnnnnnnnnnnnnnnnnnnnnnnnnnnnnnnnnnnnnnnnnnnnnnnnnnnnnnnnnnnnnnnnnnnnnnnnnnnnnnnnnnnnnnnnnnnnnnnnnnnnnnnnnnnnnnnnnnnnnnnnnnnnnnnnnnnnnnnnnnnnnnnnnnnnnnnnnnnnnnnnnnnnnnnnnnnnnnnnnnnnnnnnnnnnnnnnnnnnnnnnnnnnnnnnnnnnnnnnnnnnnnnnnnnnnnnnnnnnnnnnnnnnnnnnnnnnnnnnnnnnnnnnnnnnnnnnnnnnnnnnnnnnnnnnnnnnnnnnnnnnnnnnnnnnnnnnnnnnnnnnnnnnnnnnnnnnnnnnnnnnnnnnnnnnnnnnnnnnnnnnnnnnnnnnnnnnnnnnnnnnnnnnnnnnnnnnnnnnnnnnnnnnnnnnnnnnnnnnnnnnnnnnnnnnnnnnnnnnnnnnnnnnnnnnnnnnnnnnnnnnnnnnnnnnnnnnnnnnnnnnnnnnnnnnnnnnnnnnnnnnnnnnnnnnnnnnnnnnnnnnnnnnnnnnnnnnnnnnnnnnnnnnnnnnnnnnnnnnnnnnnnnnnnnnnnnnnnnnnnnnnnnnnnnnnnnnnnnnnnnnnnnnnnnnnnnnnnnnnnnnnnnnnnnnnnnnnnnnnnnnnnnnnnnnnnnnnnnnnnnnnnnnnnnnnnnnnnnnnnnnnnnnnnnnnnnnnnnnnnnnnnnnnnnnnnnnnnnnnnnnnnnnnnnnnnnnnnnnnnnnnnnnnnnnnnnnnnnnnnnnnnnnnnnnnnnnnnnnnnnnnnnnnnnnnnnnnnnnnnnnnnnnnnnnnnnnnnnnnnnnnnnnnnnnnnnnnnnnnnnnnnnnnnnnnnnnnnnnnnnnnnnnnnnnnnnnnnnnnnnnnnnnnnnnnnnnnnnnnnnnnnnnnnnnnnnnnnnnnnnnnnnnnnnnnnnnnnnnnnnnnnnnnnnnnnnnnnnnnnnnnnnnnnnnnnnnnnnnnnnnnnnnnnnnnnnnnnnnnnnnnnnnnnnnnnnnnnnnnnnnnnnnnnnnnnnnnnnnnnnnnnnnnnnnnnnnnnnnnnnnnnnnnnnnnnnnnnnnnnnnnnnnnnnnnnnnnnnnnnnnnnnnnnnnnnnnnnnnnnnnnnnnnnnnnnnnnnnnnnnnnnnnnnnnnnnnnnnnnnnnnnnnnnnnnnnnnnnnnnnnnnnnnnnnnnnnnnnnnnnnnnnnnnnnnnnnnnnnnnnnnnnnnnnnnnnnnnnnnnnnnnnnnnnnnnnnnnnnnnnnnnnnnnnnnnnnnnnnnnnnnnnnnnnnnnnnnnnnnnnnnnnnnnnnnnnnnnnnnnnnnnnnnnnnnnnnnnnnnnnnnnnnnnnnnnnnnnnnnnnnnnnnnnnnnnnnnnnnnnnnnnnnnnnnnnnnnnnnnnnnnnnnnnnnnnnnnnnnnnnnnnnnnnnnnnnnnnnnnnnnnnnnnnnnnnnnnnnnnnnnnnnnnnnnnnnnnnnnnnnnnnnnnnnnnnnnnnnnnnnnnnnnnnnnnnnnnnnnnnnnnnnnnnnnnnnnnnnnnnnnnnnnnnnnnnnnnnnnnnnnnnnnnnnnnnnnnnnnnnnnnnnnnnnnnnnnnnnnnnnnnnnnnnnnnnnnnnnnnnnnnnnnnnnnnnnnnnnnnnnnnnnnnnnnnnnnnnnnnnnnnnnnnnnnnnnnnnnnnnnnnnnnnnnnnnnnnnnnnnnnnnnnnnnnnnnnnnnnnnnnnnnnnnnnnnnnnnnnnnnnnnnnnnnnnnnnnnnnnnnnnnnnnnnnnnnnnnnnnnnnnnnnnnnnnnnnnnnnnnnnnnnnnnnnnnnnnnnnnnnnnnnnnnnnnnnnnnnnnnnnnnnnnnnnnnnnnnnnnnnnnnnnnnnnnnnnnnnnnnnnnnnnnnnnnnnnnnnnnnnnnnnnnnnnnnnnnnnnnnnnnnnnnnnnnnnnnnnnnnnnnnnnnnnnnnnnnnnnnnnnnnnnnnnnnnnnnnnnnnnnnnnnnnnnnnnnnnnnnnnnnnnnnnnnnnnnnnnnnnnnnnnnnnnnnnnnnnnnnnnnnnnnnnnnnnnnnnnnnnnnnnnnnnnnnnnnnnnnnnnnnnnnnnnnnnnnnnnnnnnnnnnnnnnnnnnnnnnnnnnnnnnnnnnnnnnnnnnnnnnnnnnnnnnnnnnnnnnnnnnnnnnnnnnnnnnnnnnnnnnnnnnnnnnnnnnnnnnnnnnnnnnnnnnnnnnnnnnnnnnnnnnnnnnnnnnnnnnnnnnnnnnnnnnnnnnnnnnnnnnnnnnnnnnnnnnnnnnnnnnnnnnnnnnnnnnnnnnnnnnnnnnnnnnnnnnnnnnnnnnnnnnnnnnnnnnnnnnnnnnnnnnnnnnnnnnnnnnnnnnnnnnnnnnnnnnnnnnnnnnnnnnnnnnnnnnnnnnnnnnnnnnnnnnnnnnnnnnnnnnnnnnnnnnnnnnnnnnnnnnnnnnnnnnnnnnnnnnnnnnnnnnnnnnnnnnnnnnnnnnnnnnnnnnnnnnnnnnnnnnnnnnnnnnnnnnnnnnnnnnnnnnnnnnnnnnnnnnnnnnnnnnnnnnnnnnnnnnnnnnnnnnnnnnnnnnnnnnnnnnnnnnnnnnnnnnnnnnnnnnnnnnnnnnnnnnnnnnnnnnnnnnnnnnnnnnnnnnnnnnnnnnnnnnnnnnnnnnnnnnnnnnnnnnnnnnnnnnnnnnnnnnnnnnnnnnnnnnnnnnnnnnnnnnnnnnnnnnnnnnnnnnnnnnnnnnnnnnnnnnnnnnnnnnnnnnnnnnnnnnnnnnnnnnnnnnnnnnnnnnnnnnnnnnnnnnnnnnnnnnnnnnnnnnnnnnnnnnnnnnnnnnnnnnnnnnnnnnnnnnnnnnnnnnnnnnnnnnnnnnnnnnnnnnnnnnnnnnnnnnnnnnnnnnnnnnnnnnnnnnnnnnnnnnnnnnnnnnnnnnnnnnnnnnnnnnnnnnnnnnnnnnnnnnnnnnnnnnnnnnnnnnnnnnnnnnnnnnnnnnnnnnnnnnnnnnnnnnnnnnnnnnnnnnnnnnnnnnnnnnnnnnnnnnnnnnnnnnnnnnnnnnnnnnnnnnnnnnnnnnnnnnnnnnnnnnnnnnnnnnnnnnnnnnnnnnnnnnnnnnnnnnnnnnnnnnnnnnnnnnnnnnnnnnnnnnnnnnnnnnnnnnnnnnnnnnnnnnnnnnnnnnnnnnnnnnnnnnnnnnnnnnnnnnnnnnnnnnnnnnnnnnnnnnnnnnnnnnnnnnnnnnnnnnnnnnnnnnnnnnnnnnnnnnnnnnnnnnnnnnnnnnnnnnnnnnnnnnnnnnnnnnnnnnnnnnnnnnnnnnnnnnnnnnnnnnnnnnnnnnnnnnnnnnnnnnnnnnnnnnnnnnnnnnnnnnnnnnnnnnnnnnnnnnnnnnnnnnnnnnnnnnnnnnnnnnnnnnnnnnnnnnnnnnnnnnnnnnnnnnnnnnnnnnnnnnnnnnnnnnnnnnnnnnnnnnnnnnnnnnnnnnnnnnnnnnnnnnnnnnnnnnnnnnnnnnnnnnnnnnnnnnnnnnnnnnnnnnnnnnnnnnnnnnnnnnnnnnnnnnnnnnnnnnnnnnnnnnnnnnnnnnnnnnnnnnnnnnnnnnnnnnnnnnnnnnnnnnnnnnnnnnnnnnnnnnnnnnnnnnnnnnnnnnnnnnnnnnnnnnnnnnnnnnnnnnnnnnnnnnnnnnnnnnnnnnnnnnnnnnnnnnnnnnnnnnnnnnnnnnnnnnnnnnnnnnnnnnnnnnnnnnnnnnnnnnnnnnnnnnnnnnnnnnnnnnnnnnnnnnnnnnnnnnnnnnnnnnnnnnnnnnnnnnnnnnnnnnnnnnnnnnnnnnnnnnnnnnnnnnnnnnnnnnnnnnnnnnnnnnnnnnnnnnnnnnnnnnnnnnnnnnnnnnnnnnnnnnnnnnnnnnnnnnnnnnnnnnnnnnnnnnnnnnnnnnnnnnnnnnnnnnnnnnnnnnnnnnnnnnnnnnnnnnnnnnnnnnnnnnnnnnnnnnnnnnnnnnnnnnnnnnnnnnnnnnnnnnnnnnnnnnnnnnnnnnnnnnnnnnnnnnnnnnnnnnnnnnnnnnnnnnnnnnnnnnnnnnnnnnnnnnnnnnnnnnnnnnnnnnnnnnnnnnnnnnnnnnnnnnnnnnnnnnnnnnnnnnnnnnnnnnnnnnnnnnnnnnnnnnnnnnnnnnnnnnnnnnnnnnnnnnnnnnnnnnnnnnnnnnnnnnnnnnnnnnnnnnnnnnnnnnnnnnnnnnnnnnnnnnnnnnnnnnnnnnnnnnnnnnnnnnnnnnnnnnnnnnnnnnnnnnnnnnnnnnnnnnnnnnnnnnnnnnnnnnnnnnnnnnnnnnnnnnnnnnnnnnnnnnnnnnnnnnnnnnnnnnnnnnnnnnnnnnnnnnnnnnnnnnnnnnnnnnnnnnnnnnnnnnnnnnnnnnnnnnnnnnnnnnnnnnnnnnnnnnnnnnnnnnnnnnnnnnnnnnnnnnnnnnnnnnnnnnnnnnnnnnnnnnnnnnnnnnnnnnnnnnnnnnnnnnnnnnnnnnnnnnnnnnnnnnnnnnnnnnnnnnnnnnnnnnnnnnnnnnnnnnnnnnnnnnnnnnnnnnnnnnnnnnnnnnnnnnnnnnnnnnnnnnnnnnnnnnnnnnnnnnnnnnnnnnnnnnnnnnnnnnnnnnnnnnnnnnnnnnnnnnnnnnnnnnnnnnnnnnnnnnnnnnnnnnnnnnnnnnnnnnnnnnnnnnnnnnnnnnnnnnnnnnnnnnnnnnnnnnnnnnnnnnnnnnnnnnnnnnnnnnnnnnnnnnnnnnnnnnnnnnnnnnnnnnnnnnnnnnnnnnnnnnnnnnnnnnnnnnnnnnnnnnnnnnnnnnnnnnnnnnnnnnnnnnnnnnnnnnnnnnnnnnnnnnnnnnnnnnnnnnnnnnnnnnnnnnnnnnnnnnnnnnnnnnnnnnnnnnnnnnnnnnnnnnnnnnnnnnnnnnnnnnnnnnnnnnnnnnnnnnnnnnnnnnnnnnnnnnnnnnnnnnnnnnnnnnnnnnnnnnnnnnnnnnnnnnnnnnnnnnnnnnnnnnnnnnnnnnnnnnnnnnnnnnnnnnnnnnnnnnnnnnnnnnnnnnnnnnnnnnnnnnnnnnnnnnnnnnnnnnnnnnnnnnnnnnnnnnnnnnnnnnnnnnnnnnnnnnnnnnnnnnnnnnnnnnnnnnnnnnnnnnnnnnnnnnnnnnnnnnnnnnnnnnnnnnnnnnnnnnnnnnnnnnnnnnnnnnnnnnnnnnnnnnnnnnnnnnnnnnnnnnnnnnnnnnnnnnnnnnnnnnnnnnnnnnnnnnnnnnnnnnnnnnnnnnnnnnnnnnnnnnnnnnnnnnnnnnnnnnnnnnnnnnnnnnnnnnnnnnnnnnnnnnnnnnnnnnnnnnnnnnnnnnnnnnnnnnnnnnnnnnnnnnnnnnnnnnnnnnnnnnnnnnnnnnnnnnnnnnnnnnnnnnnnnnnnnnnnnnnnnnnnnnnnnnnnnnnnnnnnnnnnnnnnnnnnnnnnnnnnnnnnnnnnnnnnnnnnnnnnnnnnnnnnnnnnnnnnnnnnnnnnnnnnnnnnnnnnnnnnnnnnnnnnnnnnnnnnnnnnnnnnnnnnnnnnnnnnnnnnnnnnnnnnnnnnnnnnnnnnnnnnnnnnnnnnnnnnnnnnnnnnnnnnnnnnnnnnnnnnnnnnnnnnnnnnnnnnnnnnnnnnnnnnnnnnnnnnnnnnnnnnnnnnnnnnnnnnnnnnnnnnnnnnnnnnnnnnnnnnnnnnnnnnnnnnnnnnnnnnnnnnnnnnnnnnnnnnnnnnnnnnnnnnnnnnnnnnnnnnnnnnnnnnnnnnnnnnnnnnnnnnnnnnnnnnnnnnnnnnnnnnnnnnnnnnnnnnnnnnnnnnnnnnnnnnnnnnnnnnnnnnnnnnnnnnnnnnnnnnnnnnnnnnnnnnnnnnnnnnnnnnnnnnnnnnnnnnnnnnnnnnnnnnnnnnnnnnnnnnnnnnnnnnnnnnnnnnnnnnnnnnnnnnnnnnnnnnnnnnnnnnnnnnnnnnnnnnnnnnnnnnnnnnnnnnnnnnnnnnnnnnnnnnnnnnnnnnnnnnnnnnnnnnnnnnnnnnnnnnnnnnnnnnnnnnnnnnnnnnnnnnnnnnnnnnnnnnnnnnnnnnnnnnnnnnnnnnnnnnnnnnnnnnnnnnnnnnnnnnnnnnnnnnnnnnnnnnnnnnnnnnnnnnnnnnnnnnnnnnnnnnnnnnnnnnnnnnnnnnnnnnnnnnnnnnnnnnnnnnnnnnnnnnnnnnnnnnnnnnnnnnnnnnnnnnnnnnnnnnnnnnnnnnnnnnnnnnnnnnnnnnnnnnnnnnnnnnnnnnnnnnnnnnnnnnnnnnnnnnnnnnnnnnnnnnnnnnnnnnnnnnnnnnnnnnnnnnnnnnnnnnnnnnnnnnnnnnnnnnnnnnnnnnnnnnnnnnnnnnnnnnnnnnnnnnnnnnnnnnnnnnnnnnnnnnnnnnnnnnnnnnnnnnnnnnnnnnnnnnnnnnnnnnnnnnnnnnnnnnnnnnnnnnnnnnnnnnnnnnnnnnnnnnnnnnnnnnnnnnnnnnnnnnnnnnnnnnnnnnnnnnnnnnnnnnnnnnnnnnnnnnnnnnnnnnnnnnnnnnnnnnnnnnnnnnnnnnnnnnnnnnnnnnnnnnnnnnnnnnnnnnnnnnnnnnnnnnnnnnnnnnnnnnnnnnnnnnnnnnnnnnnnnnnnnnnnnnnnnnnnnnnnnnnnnnnnnnnnnnnnnnnnnnnnnnnnnnnnnnnnnnnnnnnnnnnnnnnnnnnnnnnnnnnnnnnnnnnnnnnnnnnnnnnnnnnnnnnnnnnnnnnnnnnnnnnnnnnnnnnnnnnnnnnnnnnnnnnnnnnnnnnnnnnnnnnnnnnnnnnnnnnnnnnnnnnnnnnnnnnnnnnnnnnnnnnnnnnnnnnnnnnnnnnnnnnnnnnnnnnnnnnnnnnnnnnnnnnnnnnnnnnnnnnnnnnnnnnnnnnnnnnnnnnnnnnnnnnnnnnnnnnnnnnnnnnnnnnnnnnnnnnnnnnnnnnnnnnnnnnnnnnnnnnnnnnnnnnnnnnnnnnnnnnnnnnnnnnnnnnnnnnnnnnnnnnnnnnnnnnnnnnnnnnnnnnnnnnnnnnnnnnnnnnnnnnnnnnnnnnnnnnnnnnnnnnnnnnnnnnnnnnnnnnnnnnnnnnnnnnnnnnnnnnnnnnnnnnnnnnnnnnnnnnnnnnnnnnnnnnnnnnnnnnnnnnnnnnnnnnnnnnnnnnnnnnnnnnnnnnnnnnnnnnnnnnnnnnnnnnnnnnnnnnnnnnnnnnnnnnnnnnnnnnnnnnnnnnnnnnnnnnnnnnnnnnnnnnnnnnnnnnnnnnnnnnnnnnnnnnnnnnnnnnnnnnnnnnnnnnnnnnnnnnnnnnnnnnnnnnnnnnnnnnnnnnnnnnnnnnnnnnnnnnnnnnnnnnnnnnnnnnnnnnnnnnnnnnnnnnnnnnnnnnnnnnnnnnnnnnnnnnnnnnnnnnnnnnnnnnnnnnnnnnnnnnnnnnnnnnnnnnnnnnnnnnnnnnnnnnnnnnnnnnnnnnnnnnnnnnnnnnnnnnnnnnnnnnnnnnnnnnnnnnnnnnnnnnnnnnnnnnnnnnnnnnnnnnnnnnnnnnnnnnnnnnnnnnnnnnnnnnnnnnnnnnnnnnnnnnnnnnnnnnnnnnnnnnnnnnnnnnnnnnnnnnnnnnnnnnnnnnnnnnnnnnnnnnnnnnnnnnnnnnnnnnnnnnnnnnnnnnnnnnnnnnnnnnnnnnnnnnnnnnnnnnnnnnnnnnnnnnnnnnnnnnnnnnnnnnnnnnnnnnnnnnnnnnnnnnnnnnnnnnnnnnnnnnnnnnnnnnnnnnnnnnnnnnnnnnnnnnnnnnnnnnnnnnnnnnnnnnnnnnnnnnnnnnnnnnnnnnnnnnnnnnnnnnnnnnnnnnnnnnnnnnnnnnnnnnnnnnnnnnnnnnnnnnnnnnnnnnnnnnnnnnnnnnnnnnnnnnnnnnnnnnnnnnnnnnnnnnnnnnnnnnnnnnnnnnnnnnnnnnnnnnnnnnnnnnnnnnnnnnnnnnnnnnnnnnnnnnnnnnnnnnnnnnnnnnnnnnnnnnnnnnnnnnnnnnnnnnnnnnnnnnnnnnnnnnnnnnnnnnnnnnnnnnnnnnnnnnnnnnnnnnnnnnnnnnnnnnnnnnnnnnnnnnnnnnnnnnnnnnnnnnnnnnnnnnnnnnnnnnnnnnnnnnnnnnnnnnnnnnnnnnnnnnnnnnnnnnnnnnnnnnnnnnnnnnnnnnnnnnnnnnnnnnnnnnnnnnnnnnnnnnnnnnnnnnnnnnnnnnnnnnnnnnnnnnnnnnnnnnnnnnnnnnnnnnnnnnnnnnnnnnnnnnnnnnnnnnnnnnnnnnnnnnnnnnnnnnnnnnnnnnnnnnnnnnnnnnnnnnnnnnnnnnnnnnnnnnnnnnnnnnnnnnnnnnnnnnnnnnnnnnnnnnnnnnnnnnnnnnnnnnnnnnnnnnnnnnnnnnnnnnnnnnnnnnnnnnnnnnnnnnnnnnnnnnnnnnnnnnnnnnnnnnnnnnnnnnnnnnnnnnnnnnnnnnnnnnnnnnnnnnnnnnnnnnnnnnnnnnnnnnnnnnnnnnnnnnnnnnnnnnnnnnnnnnnnnnnnnnnnnnnnnnnnnnnnnnnnnnnnnnnnnnnnnnnnnnnnnnnnnnnnnnnnnnnnnnnnnnnnnnnnnnnnnnnnnnnnnnnnnnnnnnnnnnnnnnnnnnnnnnnnnnnnnnnnnnnnnnnnnnnnnnnnnnnnnnnnnnnnnnnnnnnnnnnnnnnnnnnnnnnnnnnnnnnnnnnnnnnnnnnnnnnnnnnnnnnnnnnnnnnnnnnnnnnnnnnnnnnnnnnnnnnnnnnnnnnnnnnnnnnnnnnnnnnnnnnnnnnnnnnnnnnnnnnnnnnnnnnnnnnnnnnnnnnnnnnnnnnnnnnnnnnnnnnnnnnnnnnnnnnnnnnnnnnnnnnnnnnnnnnnnnnnnnnnnnnnnnnnnnnnnnnnnnnnnnnnnnnnnnnnnnnnnnnnnnnnnnnnnnnnnnnnnnnnnnnnnnnnnnnnnnnnnnnnnnnnnnnnnnnnnnnnnnnnnnnnnnnnnnnnnnnnnnnnnnnnnnnnnnnnnnnnnnnnnnnnnnnnnnnnnnnnnnnnnnnnnnnnnnnnnnnnnnnnnnnnnnnnnnnnnnnnnnnnnnnnnnnnnnnnnnnnnnnnnnnnnnnnnnnnnnnnnnnnnnnnnnnnnnnnnnnnnnnnnnnnnnnnnnnnnnnnnnnnnnnnnnnnnnnnnnnnnnnnnnnnnnnnnnnnnnnnnnnnnnnnnnnnnnnnnnnnnnnnnnnnnnnnnnnnnnnnnnnnnnnnnnnnnnnnnnnnnnnnnnnnnnnnnnnnnnnnnnnnnnnnnnnnnnnnnnnnnnnnnnnnnnnnnnnnnnnnnnnnnnnnnnnnnnnnnnnnnnnnnnnnnnnnnnnnnnnnnnnnnnnnnnnnnnnnnnnnnnnnnnnnnnnnnnnnnnnnnnnnnnnnnnnnnnnnnnnnnnnnnnnnnnnnnnnnnnnnnnnnnnnnnnnnnnnnnnnnnnnnnnnnnnnnnnnnnnnnnnnnnnnnnnnnnnnnnnnnnnnnnnnnnnnnnnnnnnnnnnnnnnnnnnnnnnnnnnnnnnnnnnnnnnnnnnnnnnnnnnnnnnnnnnnnnnnnnnnnnnnnnnnnnnnnnnnnnnnnnnnnnnnnnnnnnnnnnnnnnnnnnnnnnnnnnnnnnnnnnnnnnnnnnnnnnnnnnnnnnnnnnnnnnnnnnnnnnnnnnnnnnnnnnnnnnnnnnnnnnnnnnnnnnnnnnnnnnnnnnnnnnnnnnnnnnnnnnnnnnnnnnnnnnnnnnnnnnnnnnnnnnnnnnnnnnnnnnnnnnnnnnnnnnnnnnnnnnnnnnnnnnnnnnnnnnnnnnnnnnnnnnnnnnnnnnnnnnnnnnnnnnnnnnnnnnnnnnnnnnnnnnnnnnnnnnnnnnnnnnnnnnnnnnnnnnnnnnnnnnnnnnnnnnnnnnnnnnnnnnnnnnnnnnnnnnnnnnnnnnnnnnnnnnnnnnnnnnnnnnnnnnnnnnnnnnnnnnnnnnnnnnnnnnnnnnnnnnnnnnnnnnnnnnnnnnnnnnnnnnnnnnnnnnnnnnnnnnnnnnnnnnnnnnnnnnnnnnnnnnnnnnnnnnnnnnnnnnnnnnnnnnnnnnnnnnnnnnnnnnnnnnnnnnnnnnnnnnnnnnnnnnnnnnnnnnnnnnnnnnnnnnnnnnnnnnnnnnnnnnnnnnnnnnnnnnnnnnnnnnnnnnnnnnnnnnnnnnnnnnnnnnnnnnnnnnnnnnnnnnnnnnnnnnnnnnnnnnnnnnnnnnnnnnnnnnnnnnnnnnnnnnnnnnnnnnnnnnnnnnnnnnnnnnnnnnnnnnnnnnnnnnnnnnnnnnnnnnnnnnnnnnnnnnnnnnnnnnnnnnnnnnnnnnnnnnnnnnnnnnnnnnnnnnnnnnnnnnnnnnnnnnnnnnnnnnnnnnnnnnnnnnnnnnnnnnnnnnnnnnnnnnnnnnnnnnnnnnnnnnnnnnnnnnnnnnnnnnnnnnnnnnnnnnnnnnnnnnnnnnnnnnnnnnnnnnnnnnnnnnnnnnnnnnnnnnnnnnnnnnnnnnnnnnnnnnnnnnnnnnnnnnnnnnnnnnnnnnnnnnnnnnnnnnnnnnnnnnnnnnnnnnnnnnnnnnnnnnnnnnnnnnnnnnnnnnnnnnnnnnnnnnnnnnnnnnnnnnnnnnnnnnnnnnnnnnnnnnnnnnnnnnnnnnnnnnnnnnnnnnnnnnnnnnnnnnnnnnnnnnnnnnnnnnnnnnnnnnnnnnnnnnnnnnnnnnnnnnnnnnnnnnnnnnnnnnnnnnnnnnnnnnnnnnnnnnnnnnnnnnnnnnnnnnnnnnnnnnnnnnnnnnnnnnnnnnnnnnnnnnnnnnnnnnnnnnnnnnnnnnnnnnnnnnnnnnnnnnnnnnnnnnnnnnnnnnnnnnnnnnnnnnnnnnnnnnnnnnnnnnnnnnnnnnnnnnnnnnnnnnnnnnnnnnnnnnnnnnnnnnnnnnnnnnnnnnnnnnnnnnnnnnnnnnnnnnnnnnnnnnnnnnnnnnnnnnnnnnnnnnnnnnnnnnnnnnnnnnnnnnnnnnnnnnnnnnnnnnnnnnnnnnnnnnnnnnnnnnnnnnnnnnnnnnnnnnnnnnnnnnnnnnnnnnnnnnnnnnnnnnnnnnnnnnnnnnnnnnnnnnnnnnnnnnnnnnnnnnnnnnnnnnnnnnnnnnnnnnnnnnnnnnnnnnnnnnnnnnnnnnnnnnnnnnnnnnnnnnnnnnnnnnnnnnnnnnnnnnnnnnnnnnnnnnnnnnnnnnnnnnnnnnnnnnnnnnnnnnnnnnnnnnnnnnnnnnnnnnnnnnnnnnnnnnnnnnnnnnnnnnnnnnnnnnnnnnnnnnnnnnnnnnnnnnnnnnnnnnnnnnnnnnnnnnnnnnnnnnnnnnnnnnnnnnnnnnnnnnnnnnnnnnnnnnnnnnnnnnnnnnnnnnnnnnnnnnnnnnnnnnnnnnnnnnnnnnnnnnnnnnnnnnnnnnnnnnnnnnnnnnnnnnnnnnnnnnnnnnnnnnnnnnnnnnnnnnnnnnnnnnnnnnnnnnnnnnnnnnnnnnnnnnnnnnnnnnnnnnnnnnnnnnnnnnnnnnnnnnnnnnnnnnnnnnnnnnnnnnnnnnnnnnnnnnnnnnnnnnnnnnnnnnnnnnnnnnnnnnnnnnnnnnnnnnnnnnnnnnnnnnnnnnnnnnnnnnnnnnnnnnnnnnnnnnnnnnnnnnnnnnnnnnnnnnnnnnnnnnnnnnnnnnnnnnnnnnnnnnnnnnnnnnnnnnnnnnnnnnnnnnnnnnnnnnnnnnnnnnnnnnnnnnnnnnnnnnnnnnnnnnnnnnnnnnnnnnnnnnnnnnnnnnnnnnnnnnnnnnnnnnnnnnnnnnnnnnnnnnnnnnnnnnnnnnnnnnnnnnnnnnnnnnnnnnnnnnnnnnnnnnnnnnnnnnnnnnnnnnnnnnnnnnnnnnnnnnnnnnnnnnnnnnnnnnnnnnnnnnnnnnnnnnnnnnnnnnnnnnnnnnnnnnnnnnnnnnnnnnnnnnnnnnnnnnnnnnnnnnnnnnnnnnnnnnnnnnnnnnnnnnnnnnnnnnnnnnnnnnnnnnnnnnnnnnnnnnnnnnnnnnnnnnnnnnnnnnnnnnnnnnnnnnnnnnnnnnnnnnnnnnnnnnnnnnnnnnnnnnnnnnnnnnnnnnnnnnnnnnnnnnnnnnnnnnnnnnnnnnnnnnnnnnnnnnnnnnnnnnnnnnnnnnnnnnnnnnnnnnnnnnnnnnnnnnnnnnnnnnnnnnnnnnnnnnnnnnnnnnnnnnnnnnnnnnnnnnnnnnnnnnnnnnnnnnnnnnnnnnnnnnnnnnnnnnnnnnnnnnnnnnnnnnnnnnnnnnnnnnnnnnnnnnnnnnnnnnnnnnnnnnnnnnnnnnnnnnnnnnnnnnnnnnnnnnnnnnnnnnnnnnnnnnnnnnnnnnnnnnnnnnnnnnnnnnnnnnnnnnnnnnnnnnnnnnnnnnnnnnnnnnnnnnnnnnnnnnnnnnnnnnnnnnnnnnnnnnnnnnnnnnnnnnnnnnnnnnnnnnnnnnnnnnnnnnnnnnnnnnnnnnnnnnnnnnnnnnnnnnnnnnnnnnnnnnnnnnnnnnnnnnnnnnnnnnnnnnnnnnnnnnnnnnnnnnnnnnnnnnnnnnnnnnnnnnnnnnnnnnnnnnnnnnnnnnnnnnnnnnnnnnnnnnnnnnnnnnnnnnnnnnnnnnnnnnnnnnnnnnnnnnnnnnnnnnnnnnnnnnnnnnnnnnnnnnnnnnnnnnnnnnnnnnnnnnnnnnnnnnnnnnnnnnnnnnnnnnnnnnnnnnnnnnnnnnnnnnnnnnnnnnnnnnnnnnnnnnnnnnnnnnnnnnnnnnnnnnnnnnnnnnnnnnnnnnnnnnnnnnnnnnnnnnnnnnnnnnnnnnnnnnnnnnnnnnnnnnnnnnnnnnnnnnnnnnnnnnnnnnnnnnnnnnnnnnnnnnnnnnnnnnnnnnnnnnnnnnnnnnnnnnnnnnnnnnnnnnnnnnnnnnnnnnnnnnnnnnnnnnnnnnnnnnnnnnnnnnnnnnnnnnnnnnnnnnnnnnnnnnnnnnnnnnnnnnnnnnnnnnnnnnnnnnnnnnnnnnnnnnnnnnnnnnnnnnnnnnnnnnnnnnnnnnnnnnnnnnnnnnnnnnnnnnnnnnnnnnnnnnnnnnnnnnnnnnnnnnnnnnnnnnnnnnnnnnnnnnnnnnnnnnnnnnnnnnnnnnnnnnnnnnnnnnnnnnnnnnnnnnnnnnnnnnnnnnnnnnnnnnnnnnnnnnnnnnnnnnnnnnnnnnnnnnnnnnnnnnnnnnnnnnnnnnnnnnnnnnnnnnnnnnnnnnnnnnnnnnnnnnnnnnnnnnnnnnnnnnnnnnnnnnnnnnnnnnnnnnnnnnnnnnnnnnnnnnnnnnnnnnnnnnnnnnnnnnnnnnnnnnnnnnnnnnnnnnnnnnnnnnnnnnnnnnnnnnnnnnnnnnnnnnnnnnnnnnnnnnnnnnnnnnnnnnnnnnnnnnnnnnnnnnnnnnnnnnnnnnnnnnnnnnnnnnnnnnnnnnnnnnnnnnnnnnnnnnnnnnnnnnnnnnnnnnnnnnnnnnnnnnnnnnnnnnnnnnnnnnnnnnnnnnnnnnnnnnnnnnnnnnnnnnnnnnnnnnnnnnnnnnnnnnnnnnnnnnnnnnnnnnnnnnnnnnnnnnnnnnnnnnnnnnnnnnnnnnnnnnnnnnnnnnnnnnnnnnnnnnnnnnnnnnnnnnnnnnnnnnnnnnnnnnnnnnnnnnnnnnnnnnnnnnnnnnnnnnnnnnnnnnnnnnnnnnnnnnnnnnnnnnnnnnnnnnnnnnnnnnnnnnnnnnnnnnnnnnnnnnnnnnnnnnnnnnnnnnnnnnnnnnnnnnnnnnnnnnnnnnnnnnnnnnnnnnnnnnnnnnnnnnnnnnnnnnnnnnnnnnnnnnnnnnnnnnnnnnnnnnnnnnnnnnnnnnnnnnnnnnnnnnnnnnnnnnnnnnnnnnnnnnnnnnnnnnnnnnnnnnnnnnnnnnnnnnnnnnnnnnnnnnnnnnnnnnnnnnnnnnnnnnnnnnnnnnnnnnnnnnnnnnnnnnnnnnnnnnnnnnnnnnnnnnnnnnnnnnnnnnnnnnnnnnnnnnnnnnnnnnnnnnnnnnnnnnnnnnnnnnnnnnnnnnnnnnnnnnnnnnnnnnnnnnnnnnnnnnnnnnnnnnnnnnnnnnnnnnnnnnnnnnnnnnnnnnnnnnnnnnnnnnnnnnnnnnnnnnnnnnnnnnnnnnnnnnnnnnnnnnnnnnnnnnnnnnnnnnnnnnnnnnnnnnnnnnnnnnnnnnnnnnnnnnnnnnnnnnnnnnnnnnnnnnnnnnnnnnnnnnnnnnnnnnnnnnnnnnnnnnnnnnnnnnnnnnnnnnnnnnnnnnnnnnnnnnnnnnnnnnnnnnnnnnnnnnnnnnnnnnnnnnnnnnnnnnnnnnnnnnnnnnnnnnnnnnnnnnnnnnnnnnnnnnnnnnnnnnnnnnnnnnnnnnnnnnnnnnnnnnnnnnnnnnnnnnnnnnnnnnnnnnnnnnnnnnnnnnnnnnnnnnnnnnnnnnnnnnnnnnnnnnnnnnnnnnnnnnnnnnnnnnnnnnnnnnnnnnnnnnnnnnnnnnnnnnnnnnnnnnnnnnnnnnnnnnnnnnnnnnnnnnnnnnnnnnnnnnnnnnnnnnnnnnnnnnnnnnnnnnnnnnnnnnnnnnnnnnnnnnnnnnnnnnnnnnnnnnnnnnnnnnnnnnnnnnnnnnnnnnnnnnnnnnnnnnnnnnnnnnnnnnnnnnnnnnnnnnnnnnnnnnnnnnnnnnnnnnnnnnnnnnnnnnnnnnnnnnnnnnnnnnnnnnnnnnnnnnnnnnnnnnnnnnnnnnnnnnnnnnnnnnnnnnnnnnnnnnnnnnnnnnnnnnnnnnnnnnnnnnnnnnnnnnnnnnnnnnnnnnnnnnnnnnnnnnnnnnnnnnnnnnnnnnnnnnnnnnnnnnnnnnnnnnnnnnnnnnnnnnnnnnnnnnnnnnnnnnnnnnnnnnnnnnnnnnnnnnnnnnnnnnnnnnnnnnnnnnnnnnnnnnnnnnnnnnnnnnnnnnnnnnnnnnnnnnnnnnnnnnnnnnnnnnnnnnnnnnnnnnnnnnnnnnnnnnnnnnnnnnnnnnnnnnnnnnnnnnnnnnnnnnnnnnnnnnnnnnnnnnnnnnnnnnnnnnnnnnnnnnnnnnnnnnnnnnnnnnnnnnnnnnnnnnnnnnnnnnnnnnnnnnnnnnnnnnnnnnnnnnnnnnnnnnnnnnnnnnnnnnnnnnnnnnnnnnnnnnnnnnnnnnnnnnnnnnnnnnnnnnnnnnnnnnnnnnnnnnnnnnnnnnnnnnnnnnnnnnnnnnnnnnnnnnnnnnnnnnnnnnnnnnnnnnnnnnnnnnnnnnnnnnnnnnnnnnnnnnnnnnnnnnnnnnnnnnnnnnnnnnnnnnnnnnnnnnnnnnnnnnnnnnnnnnnnnnnnnnnnnnnnnnnnnnnnnnnnnnnnnnnnnnnnnnnnnnnnnnnnnnnnnnnnnnnnnnnnnnnnnnnnnnnnnnnnnnnnnnnnnnnnnnnnnnnnnnnnnnnnnnnnnnnnnnnnnnnnnnnnnnnnnnnnnnnnnnnnnnnnnnnnnnnnnnnnnnnnnnnnnnnnnnnnnnnnnnnnnnnnnnnnnnnnnnnnnnnnnnnnnnnnnnnnnnnnnnnnnnnnnnnnnnnnnnnnnnnnnnnnnnnnnnnnnnnnnnnnnnnnnnnnnnnnnnnnnnnnnnnnnnnnnnnnnnnnnnnnnnnnnnnnnnnnnnnnnnnnnnnnnnnnnnnnnnnnnnnnnnnnnnnnnnnnnnnnnnnnnnnnnnnnnnnnnnnnnnnnnnnnnnnnnnnnnnnnnnnnnnnnnnnnnnnnnnnnnnnnnnnnnnnnnnnnnnnnnnnnnnnnnnnnnnnnnnnnnnnnnnnnnnnnnnnnnnnnnnnnnnnnnnnnnnnnnnnnnnnnnnnnnnnnnnnnnnnnnnnnnnnnnnnnnnnnnnnnnnnnnnnnnnnnnnnnnnnnnnnnnnnnnnnnnnnnnnnnnnnnnnnnnnnnnnnnnnnnnnnnnnnnnnnnnnnnnnnnnnnnnnnnnnnnnnnnnnnnnnnnnnnnnnnnnnnnnnnnnnnnnnnnnnnnnnnnnnnnnnnnnnnnnnnnnnnnnnnnnnnnnnnnnnnnnnnnnnnnnnnnnnnnnnnnnnnnnnnnnnnnnnnnnnnnnnnnnnnnnnnnnnnnnnnnnnnnnnnnnnnnnnnnnnnnnnnnnnnnnnnnnnnnnnnnnnnnnnnnnnnnnnnnnnnnnnnnnnnnnnnnnnnnnnnnnnnnnnnnnnnnnnnnnnnnnnnnnnnnnnnnnnnnnnnnnnnnnnnnnnnnnnnnnnnnnnnnnnnnnnnnnnnnnnnnnnnnnnnnnnnnnnnnnnnnnnnnnnnnnnnnnnnnnnnnnnnnnnnnnnnnnnnnnnnnnnnnnnnnnnnnnnnnnnnnnnnnnnnnnnnnnnnnnnnnnnnnnnnnnnnnnnnnnnnnnnnnnnnnnnnnnnnnnnnnnnnnnnnnnnnnnnnnnnnnnnnnnnnnnnnnnnnnnnnnnnnnnnnnnnnnnnnnnnnnnnnnnnnnnnnnnnnnnnnnnnnnnnnnnnnnnnnnnnnnnnnnnnnnnnnnnnnnnnnnnnnnnnnnnnnnnnnnnnnnnnnnnnnnnnnnnnnnnnnnnnnnnnnnnnnnnnnnnnnnnnnnnnnnnnnnnnnnnnnnnnnnnnnnnnnnnnnnnnnnnnnnnnnnnnnnnnnnnnnnnnnnnnnnnnnnnnnnnnnnnnnnnnnnnnnnnnnnnnnnnnnnnnnnnnnnnnnnnnnnnnnnnnnnnnnnnnnnnnnnnnnnnnnnnnnnnnnnnnnnnnnnnnnnnnnnnnnnnnnnnnnnnnnnnnnnnnnnnnnnnnnnnnnnnnnnnnnnnnnnnnnnnnnnnnnnnnnnnnnnnnnnnnnnnnnnnnnnnnnnnnnnnnnnnnnnnnnnnnnnnnnnnnnnnnnnnnnnnnnnnnnnnnnnnnnnnnnnnnnnnnnnnnnnnnnnnnnnnnnnnnnnnnnnnnnnnnnnnnnnnnnnnnnnnnnnnnnnnnnnnnnnnnnnnnnnnnnnnnnnnnnnnnnnnnnnnnnnnnnnnnnnnnnnnnnnnnnnnnnnnnnnnnnnnnnnnnnnnnnnnnnnnnnnnnnnnnnnnnnnnnnnnnnnnnnnnnnnnnnnnnnnnnnnnnnnnnnnnnnnnnnnnnnnnnnnnnnnnnnnnnnnnnnnnnnnnnnnnnnnnnnnnnnnnnnnnnnnnnnnnnnnnnnnnnnnnnnnnnnnnnnnnnnnnnnnnnnnnnnnnnnnnnnnnnnnnnnnnnnnnnnnnnnnnnnnnnnnnnnnnnnnnnnnnnnnnnnnnnnnnnnnnnnnnnnnnnnnnnnnnnnnnnnnnnnnnnnnnnnnnnnnnnnnnnnnnnnnnnnnnnnnnnnnnnnnnnnnnnnnnnnnnnnnnnnnnnnnnnnnnnnnnnnnnnnnnnnnnnnnnnnnnnnnnnnnnnnnnnnnnnnnnnnnnnnnnnnnnnnnnnnnnnnnnnnnnnnnnnnnnnnnnnnnnnnnnnnnnnnnnnnnnnnnnnnnnnnnnnnnnnnnnnnnnnnnnnnnnnnnnnnnnnnnnnnnnnnnnnnnnnnnnnnnnnnnnnnnnnnnnnnnnnnnnnnnnnnnnnnnnnnnnnnnnnnnnnnnnnnnnnnnnnnnnnnnnnnnnnnnnnnnnnnnnnnnnnnnnnnnnnnnnnnnnnnnnnnnnnnnnnnnnnnnnnnnnnnnnnnnnnnnnnnnnnnnnnnnnnnnnnnnnnnnnnnnnnnnnnnnnnnnnnnnnnnnnnnnnnnnnnnnnnnnnnnnnnnnnnnnnnnnnnnnnnnnnnnnnnnnnnnnnnnnnnnnnnnnnnnnnnnnnnnnnnnnnnnnnnnnnnnnnnnnnnnnnnnnnnnnnnnnnnnnnnnnnnnnnnnnnnnnnnnnnnnnnnnnnnnnnnnnnnnnnnnnnnnnnnnnnnnnnnnnnnnnnnnnnnnnnnnnnnnnnnnnnnnnnnnnnnnnnnnnnnnnnnnnnnnnnnnnnnnnnnnnnnnnnnnnnnnnnnnnnnnnnnnnnnnnnnnnnnnnnnnnnnnnnnnnnnnnnnnnnnnnnnnnnnnnnnnnnnnnnnnnnnnnnnnnnnnnnnnnnnnnnnnnnnnnnnnnnnnnnnnnnnnnnnnnnnnnnnnnnnnnnnnnnnnnnnnnnnnnnnnnnnnnnnnnnnnnnnnnnnnnnnnnnnnnnnnnnnnnnnnnnnnnnnnnnnnnnnnnnnnnnnnnnnnnnnnnnnnnnnnnnnnnnnnnnnnnnnnnnnnnnnnnnnnnnnnnnnnnnnnnnnnnnnnnnnnnnnnnnnnnnnnnnnnnnnnnnnnnnnnnnnnnnnnnnnnnnnnnnnnnnnnnnnnnnnnnnnnnnnnnnnnnnnnnnnnnnnnnnnnnnnnnnnnnnnnnnnnnnnnnnnnnnnnnnnnnnnnnnnnnnnnnnnnnnnnnnnnnnnnnnnnnnnnnnnnnnnnnnnnnnnnnnnnnnnnnnnnnnnnnnnnnnnnnnnnnnnnnnnnnnnnnnnnnnnnnnnnnnnnnnnnnnnnnnnnnnnnnnnnnnnnnnnnnnnnnnnnnnnnnnnnnnnnnnnnnnnnnnnnnnnnnnnnnnnnnnnnnnnnnnnnnnnnnnnnnnnnnnnnnnnnnnnnnnnnnnnnnnnnnnnnnnnnnnnnnnnnnnnnnnnnnnnnnnnnnnnnnnnnnnnnnnnnnnnnnnnnnnnnnnnnnnnnnnnnnnnnnnnnnnnnnnnnnnnnnnnnnnnnnnnnnnnnnnnnnnnnnnnnnnnnnnnnnnnnnnnnnnnnnnnnnnnnnnnnnnnnnnnnnnnnnnnnnnnnnnnnnnnnnnnnnnnnnnnnnnnnnnnnnnnnnnnnnnnnnnnnnnnnnnnnnnnnnnnnnnnnnnnnnnnnnnnnnnnnnnnnnnnnnnnnnnnnnnnnnnnnnnnnnnnnnnnnnnnnnnnnnnnnnnnnnnnnnnnnnnnnnnnnnnnnnnnnnnnnnnnnnnnnnnnnnnnnnnnnnnnnnnnnnnnnnnnnnnnnnnnnnnnnnnnnnnnnnnnnnnnnnnnnnnnnnnnnnnnnnnnnnnnnnnnnnnnnnnnnnnnnnnnnnnnnnnnnnnnnnnnnnnnnnnnnnnnnnnnnnnnnnnnnnnnnnnnnnnnnnnnnnnnnnnnnnnnnnnnnnnnnnnnnnnnnnnnnnnnnnnnnnnnnnnnnnnnnnnnnnnnnnnnnnnnnnnnnnnnnnnnnnnnnnnnnnnnnnnnnnnnnnnnnnnnnnnnnnnnnnnnnnnnnnnnnnnnnnnnnnnnnnnnnnnnnnnnnnnnnnnnnnnnnnnnnnnnnnnnnnnnnnnnnnnnnnnnnnnnnnnnnnnnnnnnnnnnnnnnnnnnnnnnnnnnnnnnnnnnnnnnnnnnnnnnnnnnnnnnnnnnnnnnnnnnnnnnnnnnnnnnnnnnnnnnnnnnnnnnnnnnnnnnnnnnnnnnnnnnnnnnnnnnnnnnnnnnnnnnnnnnnnnnnnnnnnnnnnnnnnnnnnnnnnnnnnnnnnnnnnnnnnnnnnnnnnnnnnnnnnnnnnnnnnnnnnnnnnnnnnnnnnnnnnnnnnnnnnnnnnnnnnnnnnnnnnnnnnnnnnnnnnnnnnnnnnnnnnnnnnnnnnnnnnnnnnnnnnnnnnnnnnnnnnnnnnnnnnnnnnnnnnnnnnnnnnnnnnnnnnnnnnnnnnnnnnnnnnnnnnnnnnnnnnnnnnnnnnnnnnnnnnnnnnnnnnnnnnnnnnnnnnnnnnnnnnnnnnnnnnnnnnnnnnnnnnnnnnnnnnnnnnnnnnnnnnnnnnnnnnnnnnnnnnnnnnnnnnnnnnnnnnnnnnnnnnnnnnnnnnnnnnnnnnnnnnnnnnnnnnnnnnnnnnnnnnnnnnnnnnnnnnnnnnnnnnnnnnnnnnnnnnnnnnnnnnnnnnnnnnnnnnnnnnnnnnnnnnnnnnnnnnnnnnnnnnnnnnnnnnnnnnnnnnnnnnnnnnnnnnnnnnnnnnnnnnnnnnnnnnnnnnnnnnnnnnnnnnnnnnnnnnnnnnnnnnnnnnnnnnnnnnnnnnnnnnnnnnnnnnnnnnnnnnnnnnnnnnnnnnnnnnnnnnnnnnnnnnnnnnnnnnnnnnnnnnnnnnnnnnnnnnnnnnnnnnnnnnnnnnnnnnnnnnnnnnnnnnnnnnnnnnnnnnnnnnnnnnnnnnnnnnnnnnnnnnnnnnnnnnnnnnnnnnnnnnnnnnnnnnnnnnnnnnnnnnnnnnnnnnnnnnnnnnnnnnnnnnnnnnnnnnnnnnnnnnnnnnnnnnnnnnnnnnnnnnnnnnnnnnnnnnnnnnnnnnnnnnnnnnnnnnnnnnnnnnnnnnnnnnnnnnnnnnnnnnnnnnnnnnnnnnnnnnnnnnnnnnnnnnnnnnnnnnnnnnnnnnnnnnnnnnnnnnnnnnnnnnnnnnnnnnnnnnnnnnnnnnnnnnnnnnnnnnnnnnnnnnnnnnnnnnnnnnnnnnnnnnnnnnnnnnnnnnnnnnnnnnnnnnnnnnnnnnnnnnnnnnnnnnnnnnnnnnnnnnnnnnnnnnnnnnnnnnnnnnnnnnnnnnnnnnnnnnnnnnnnnnnnnnnnnnnnnnnnnnnnnnnnnnnnnnnnnnnnnnnnnnnnnnnnnnnnnnnnnnnnnnnnnnnnnnnnnnnnnnnnnnnnnnnnnnnnnnnnnnnnnnnnnnnnnnnnnnnnnnnnnnnnnnnnnnnnnnnnnnnnnnnnnnnnnnnnnnnnnnnnnnnnnnnnnnnnnnnnnnnnnnnnnnnnnnnnnnnnnnnnnnnnnnnnnnnnnnnnnnnnnnnnnnnnnnnnnnnnnnnnnnnnnnnnnnnnnnnnnnnnnnnnnnnnnnnnnnnnnnnnnnnnnnnnnnnnnnnnnnnnnnnnnnnnnnnnnnnnnnnnnnnnnnnnnnnnnnnnnnnnnnnnnnnnnnnnnnnnnnnnnnnnnnnnnnnnnnnnnnnnnnnnnnnnnnnnnnnnnnnnnnnnnnnnnnnnnnnnnnnnnnnnnnnnnnnnnnnnnnnnnnnnnnnnnnnnnnnnnnnnnnnnnnnnnnnnnnnnnnnnnnnnnnnnnnnnnnnnnnnnnnnnnnnnnnnnnnnnnnnnnnnnnnnnnnnnnnnnnnnnnnnnnnnnnnnnnnnnnnnnnnnnnnnnnnnnnnnnnnnnnnnnnnnnnnnnnnnnnnnnnnnnnnnnnnnnnnnnnnnnnnnnnnnnnnnnnnnnnnnnnnnnnnnnnnnnnnnnnnnnnnnnnnnnnnnnnnnnnnnnnnnnnnnnnnnnnnnnnnnnnnnnnnnnnnnnnnnnnnnnnnnnnnnnnnnnnnnnnnnnnnnnnnnnnnnnnnnnnnnnnnnnnnnnnnnnnnnnnnnnnnnnnnnnnnnnnnnnnnnnnnnnnnnnnnnnnnnnnnnnnnnnnnnnnnnnnnnnnnnnnnnnnnnnnnnnnnnnnnnnnnnnnnnnnnnnnnnnnnnnnnnnnnnnnnnnnnnnnnnnnnnnnnnnnnnnnnnnnnnnnnnnnnnnnnnnnnnnnnnnnnnnnnnnnnnnnnnnnnnnnnnnnnnnnnnnnnnnnnnnnnnnnnnnnnnnnnnnnnnnnnnnnnnnnnnnnnnnnnnnnnnnnnnnnnnnnnnnnnnnnnnnnnnnnnnnnnnnnnnnnnnnnnnnnnnnnnnnnnnnnnnnnnnnnnnnnnnnnnnnnnnnnnnnnnnnnnnnnnnnnnnnnnnnnnnnnnnnnnnnnnnnnnnnnnnnnnnnnnnnnnnnnnnnnnnnnnnnnnnnnnnnnnnnnnnnnnnnnnnnnnnnnnnnnnnnnnnnnnnnnnnnnnnnnnnnnnnnnnnnnnnnnnnnnnnnnnnnnnnnnnnnnnnnnnnnnnnnnnnnnnnnnnnnnnnnnnnnnnnnnnnnnnnnnnnnnnnnnnnnnnnnnnnnnnnnnnnnnnnnnnnnnnnnnnnnnnnnnnnnnnnnnnnnnnnnnnnnnnnnnnnnnnnnnnnnnnnnnnnnnnnnnnnnnnnnnnnnnnnnnnnnnnnnnnnnnnnnnnnnnnnnnnnnnnnnnnnnnnnnnnnnnnnnnnnnnnnnnnnnnnnnnnnnnnnnnnnnnnnnnnnnnnnnnnnnnnnnnnnnnnnnnnnnnnnnnnnnnnnnnnnnnnnnnnnnnnnnnnnnnnnnnnnnnnnnnnnnnnnnnnnnnnnnnnnnnnnnnnnnnnnnnnnnnnnnnnnnnnnnnnnnnnnnnnnnnnnnnnnnnnnnnnnnnnnnnnnnnnnnnnnnnnnnnnnnnnnnnnnnnnnnnnnnnnnnnnnnnnnnnnnnnnnnnnnnnnnnnnnnnnnnnnnnnnnnnnnnnnnnnnnnnnnnnnnnnnnnnnnnnnnnnnnnnnnnnnnnnnnnnnnnnnnnnnnnnnnnnnnnnnnnnnnnnnnnnnnnnnnnnnnnnnnnnnnnnnnnnnnnnnnnnnnnnnnnnnnnnnnnnnnnnnnnnnnnnnnnnnnnnnnnnnnnnnnnnnnnnnnnnnnnnnnnnnnnnnnnnnnnnnnnnnnnnnnnnnnnnnnnnnnnnnnnnnnnnnnnnnnnnnnnnnnnnnnnnnnnnnnnnnnnnnnnnnnnnnnnnnnnnnnnnnnnnnnnnnnnnnnnnnnnnnnnnnnnnnnnnnnnnnnnnnnnnnnnnnnnnnnnnnnnnnnnnnnnnnnnnnnnnnnnnnnnnnnnnnnnnnnnnnnnnnnnnnnnnnnnnnnnnnnnnnnnnnnnnnnnnnnnnnnnnnnnnnnnnnnnnnnnnnnnnnnnnnnnnnnnnnnnnnnnnnnnnnnnnnnnnnnnnnnnnnnnnnnnnnnnnnnnnnnnnnnnnnnnnnnnnnnnnnnnnnnnnnnnnnnnnnnnnnnnnnnnnnnnnnnnnnnnnnnnnnnnnnnnnnnnnnnnnnnnnnnnnnnnnnnnnnnnnnnnnnnnnnnnnnnnnnnnnnnnnnnnnnnnnnnnnnnnnnnnnnnnnnnnnnnnnnnnnnnnnnnnnnnnnnnnnnnnnnnnnnnnnnnnnnnnnnnnnnnnnnnnnnnnnnnnnnnnnnnnnnnnnnnnnnnnnnnnnnnnnnnnnnnnnnnnnnnnnnnnnnnnnnnnnnnnnnnnnnnnnnnnnnnnnnnnnnnnnnnnnnnnnnnnnnnnnnnnnnnnnnnnnnnnnnnnnnnnnnnnnnnnnnnnnnnnnnnnnnnnnnnnnnnnnnnnnnnnnnnnnnnnnnnnnnnnnnnnnnnnnnnnnnnnnnnnnnnnnnnnnnnnnnnnnnnnnnnnnnnnnnnnnnnnnnnnnnnnnnnnnnnnnnnnnnnnnnnnnnnnnnnnnnnnnnnnnnnnnnnnnnnnnnnnnnnnnnnnnnnnnnnnnnnnnnnnnnnnnnnnnnnnnnnnnnnnnnnnnnnnnnnnnnnnnnnnnnnnnnnnnnnnnnnnnnnnnnnnnnnnnnnnnnnnnnnnnnnnnnnnnnnnnnnnnnnnnnnnnnnnnnnnnnnnnnnnnnnnnnnnnnnnnnnnnnnnnnnnnnnnnnnnnnnnnnnnnnnnnnnnnnnnnnnnnnnnnnnnnnnnnnnnnnnnnnnnnnnnnnnnnnnnnnnnnnnnnnnnnnnnnnnnnnnnnnnnnnnnnnnnnnnnnnnnnnnnnnnnnnnnnnnnnnnnnnnnnnnnnnnnnnnnnnnnnnnnnnnnnnnnnnnnnnnnnnnnnnnnnnnnnnnnnnnnnnnnnnnnnnnnnnnnnnnnnnnnnnnnnnnnnnnnnnnnnnnnnnnnnnnnnnnnnnnnnnnnnnnnnnnnnnnnnnnnnnnnnnnnnnnnnnnnnnnnnnnnnnnnnnnnnnnnnnnnnnnnnnnnnnnnnnnnnnnnnnnnnnnnnnnnnnnnnnnnnnnnnnnnnnnnnnnnnnnnnnnnnnnnnnnnnnnnnnnnnnnnnnnnnnnnnnnnnnnnnnnnnnnnnnnnnnnnnnnnnnnnnnnnnnnnnnnnnnnnnnnnnnnnnnnnnnnnnnnnnnnnnnnnnnnnnnnnnnnnnnnnnnnnnnnnnnnnnnnnnnnnnnnnnnnnnnnnnnnnnnnnnnnnnnnnnnnnnnnnnnnnnnnnnnnnnnnnnnnnnnnnnnnnnnnnnnnnnnnnnnnnnnnnnnnnnnnnnnnnnnnnnnnnnnnnnnnnnnnnnnnnnnnnnnnnnnnnnnnnnnnnnnnnnnnnnnnnnnnnnnnnnnnnnnnnnnnnnnnnnnnnnnnnnnnnnnnnnnnnnnnnnnnnnnnnnnnnnnnnnnnnnnnnnnnnnnnnnnnnnnnnnnnnnnnnnnnnnnnnnnnnnnnnnnnnnnnnnnnnnnnnnnnnnnnnnnnnnnnnnnnnnnnnnnnnnnnnnnnnnnnnnnnnnnnnnnnnnnnnnnnnnnnnnnnnnnnnnnnnnnnnnnnnnnnnnnnnnnnnnnnnnnnnnnnnnnnnnnnnnnnnnnnnnnnnnnnnnnnnnnnnnnnnnnnnnnnnnnnnnnnnnnnnnnnnnnnnnnnnnnnnnnnnnnnnnnnnnnnnnnnnnnnnnnnnnnnnnnnnnnnnnnnnnnnnnnnnnnnnnnnnnnnnnnnnnnnnnnnnnnnnnnnnnnnnnnnnnnnnnnnnnnnnnnnnnnnnnnnnnnnnnnnnnnnnnnnnnnnnnnnnnnnnnnnnnnnnnnnnnnnnnnnnnnnnnnnnnnnnnnnnnnnnnnnnnnnnnnnnnnnnnnnnnnnnnnnnnnnnnnnnnnnnnnnnnnnnnnnnnnnnnnnnnnnnnnnnnnnnnnnnnnnnnnnnnnnnnnnnnnnnnnnnnnnnnnnnnnnnnnnnnnnnnnnnnnnnnnnnnnnnnnnnnnnnnnnnnnnnnnnnnnnnnnnnnnnnnnnnnnnnnnnnnnnnnnnnnnnnnnnnnnnnnnnnnnnnnnnnnnnnnnnnnnnnnnnnnnnnnnnnnnnnnnnnnnnnnnnnnnnnnnnnnnnnnnnnnnnnnnnnnnnnnnnnnnnnnnnnnnnnnnnnnnnnnnnnnnnnnnnnnnnnnnnnnnnnnnnnnnnnnnnnnnnnnnnnnnnnnnnnnnnnnnnnnnnnnnnnnnnnnnnnnnnnnnnnnnnnnnnnnnnnnnnnnnnnnnnnnnnnnnnnnnnnnnnnnnnnnnnnnnnnnnnnnnnnnnnnnnnnnnnnnnnnnnnnnnnnnnnnnnnnnnnnnnnnnnnnnnnnnnnnnnnnnnnnnnnnnnnnnnnnnnnnnnnnnnnnnnnnnnnnnnnnnnnnnnnnnnnnnnnnnnnnnnnnnnnnnnnnnnnnnnnnnnnnnnnnnnnnnnnnnnnnnnnnnnnnnnnnnnnnnnnnnnnnnnnnnnnnnnnnnnnnnnnnnnnnnnnnnnnnnnnnnnnnnnnnnnnnnnnnnnnnnnnnnnnnnnnnnnnnnnnnnnnnnnnnnnnnnnnnnnnnnnnnnnnnnnnnnnnnnnnnnnnnnnnnnnnnnnnnnnnnnnnnnnnnnnnnnnnnnnnnnnnnnnnnnnnnnnnnnnnnnnnnnnnnnnnnnnnnnnnnnnnnnnnnnnnnnnnnnnnnnnnnnnnnnnnnnnnnnnnnnnnnnnnnnnnnnnnnnnnnnnnnnnnnnnnnnnnnnnnnnnnnnnnnnnnnnnnnnnnnnnnnnnnnnnnnnnnnnnnnnnnnnnnnnnnnnnnnnnnnnnnnnnnnnnnnnnnnnnnnnnnnnnnnnnnnnnnnnnnnnnnnnnnnnnnnnnnnnnnnnnnnnnnnnnnnnnnnnnnnnnnnnnnnnnnnnnnnnnnnnnnnnnnnnnnnnnnnnnnnnnnnnnnnnnnnnnnnnnnnnnnnnnnnnnnnnnnnnnnnnnnnnnnnnnnnnnnnnnnnnnnnnnnnnnnnnnnnnnnnnnnnnnnnnnnnnnnnnnnnnnnnnnnnnnnnnnnnnnnnnnnnnnnnnnnnnnnnnnnnnnnnnnnnnnnnnnnnnnnnnnnnnnnnnnnnnnnnnnnnnnnnnnnnnnnnnnnnnnnnnnnnnnnnnnnnnnnnnnnnnnnnnnnnnnnnnnnnnnnnnnnnnnnnnnnnnnnnnnnnnnnnnnnnnnnnnnnnnnnnnnnnnnnnnnnnnnnnnnnnnnnnnnnnnnnnnnnnnnnnnnnnnnnnnnnnnnnnnnnnnnnnnnnnnnnnnnnnnnnnnnnnnnnnnnnnnnnnnnnnnnnnnnnnnnnnnnnnnnnnnnnnnnnnnnnnnnnnnnnnnnnnnnnnnnnnnnnnnnnnnnnnnnnnnnnnnnnnnnnnnnnnnnnnnnnnnnnnnnnnnnnnnnnnnnnnnnnnnnnnnnnnnnnnnnnnnnnnnnnnnnnnnnnnnnnnnnnnnnnnnnnnnnnnnnnnnnnnnnnnnnnnnnnnnnnnnnnnnnnnnnnnnnnnnnnnnnnnnnnnnnnnnnnnnnnnnnnnnnnnnnnnnnnnnnnnnnnnnnnnnnnnnnnnnnnnnnnnnnnnnnnnnnnnnnnnnnnnnnnnnnnnnnnnnnnnnnnnnnnnnnnnnnnnnnnnnnnnnnnnnnnnnnnnnnnnnnnnnnnnnnnnnnnnnnnnnnnnnnnnnnnnnnnnnnnnnnnnnnnnnnnnnnnnnnnnnnnnnnnnnnnnnnnnnnnnnnnnnnnnnnnnnnnnnnnnnnnnnnnnnnnnnnnnnnnnnnnnnnnnnnnnnnnnnnnnnnnnnnnnnnnnnnnnnnnnnnnnnnnnnnnnnnnnnnnnnnnnnnnnnnnnnnnnnnnnnnnnnnnnnnnnnnnnnnnnnnnnnnnnnnnnnnnnnnnnnnnnnnnnnnnnnnnnnnnnnnnnnnnnnnnnnnnnnnnnnnnnnnnnnnnnnnnnnnnnnnnnnnnnnnnnnnnnnnnnnnnnnnnnnnnnnnnnnnnnnnnnnnnnnnnnnnnnnnnnnnnnnnnnnnnnnnnnnnnnnnnnnnnnnnnnnnnnnnnnnnnnnnnnnnnnnnnnnnnnnnnnnnnnnnnnnnnnnnnnnnnnnnnnnnnnnnnnnnnnnnnnnnnnnnnnnnnnnnnnnnnnnnnnnnnnnnnnnnnnnnnnnnnnnnnnnnnnnnnnnnnnnnnnnnnnnnnnnnnnnnnnnnnnnnnnnnnnnnnnnnnnnnnnnnnnnnnnnnnnnnnnnnnnnnnnnnnnnnnnnnnnnnnnnnnnnnnnnnnnnnnnnnnnnnnnnnnnnnnnnnnnnnnnnnnnnnnnnnnnnnnnnnnnnnnnnnnnnnnnnnnnnnnnnnnnnnnnnnnnnnnnnnnnnnnnnnnnnnnnnnnnnnnnnnnnnnnnnnnnnnnnnnnnnnnnnnnnnnnnnnnnnnnnnnnnnnnnnnnnnnnnnnnnnnnnnnnnnnnnnnnnnnnnnnnnnnnnnnnnnnnnnnnnnnnnnnnnnnnnnnnnnnnnnnnnnnnnnnnnnnnnnnnnnnnnnnnnnnnnnnnnnnnnnnnnnnnnnnnnnnnnnnnnnnnnnnnnnnnnnnnnnnnnnnnnnnnnnnnnnnnnnnnnnnnnnnnnnnnnnnnnnnnnnnnnnnnnnnnnnnnnnnnnnnnnnnnnnnnnnnnnnnnnnnnnnnnnnnnnnnnnnnnnnnnnnnnnnnnnnnnnnnnnnnnnnnnnnnnnnnnnnnnnnnnnnnnnnnnnnnnnnnnnnnnnnnnnnnnnnnnnnnnnnnnnnnnnnnnnnnnnnnnnnnnnnnnnnnnnnnnnnnnnnnnnnnnnnnnnnnnnnnnnnnnnnnnnnnnnnnnnnnnnnnnnnnnnnnnnnnnnnnnnnnnnnnnnnnnnnnnnnnnnnnnnnnnnnnnnnnnnnnnnnnnnnnnnnnnnnnnnnnnnnnnnnnnnnnnnnnnnnnnnnnnnnnnnnnnnnnnnnnnnnnnnnnnnnnnnnnnnnnnnnnnnnnnnnnnnnnnnnnnnnnnnnnnnnnnnnnnnnnnnnnnnnnnnnnnnnnnnnnnnnnnnnnnnnnnnnnnnnnnnnnnnnnnnnnnnnnnnnnnnnnnnnnnnnnnnnnnnnnnnnnnnnnnnnnnnnnnnnnnnnnnnnnnnnnnnnnnnnnnnnnnnnnnnnnnnnnnnnnnnnnnnnnnnnnnnnnnnnnnnnnnnnnnnnnnnnnnnnnnnnnnnnnnnnnnnnnnnnnnnnnnnnnnnnnnnnnnnnnnnnnnnnnnnnnnnnnnnnnnnnnnnnnnnnnnnnnnnnnnnnnnnnnnnnnnnnnnnnnnnnnnnnnnnnnnnnnnnnnnnnnnnnnnnnnnnnnnnnnnnnnnnnnnnnnnnnnnnnnnnnnnnnnnnnnnnnnnnnnnnnnnnnnnnnnnnnnnnnnnnnnnnnnnnnnnnnnnnnnnnnnnnnnnnnnnnnnnnnnnnnnnnnnnnnnnnnnnnnnnnnnnnnnnnnnnnnnnnnnnnnnnnnnnnnnnnnnnnnnnnnnnnnnnnnnnnnnnnnnnnnnnnnnnnnnnnnnnnnnnnnnnnnnnnnnnnnnnnnnnnnnnnnnnnnnnnnnnnnnnnnnnnnnnnnnnnnnnnnnnnnnnnnnnnnnnnnnnnnnnnnnnnnnnnnnnnnnnnnnnnnnnnnnnnnnnnnnnnnnnnnnnnnnnnnnnnnnnnnnnnnnnnnnnnnnnnnnnnnnnnnnnnnnnnnnnnnnnnnnnnnnnnnnnnnnnnnnnnnnnnnnnnnnnnnnnnnnnnnnnnnnnnnnnnnnnnnnnnnnnnnnnnnnnnnnnnnnnnnnnnnnnnnnnnnnnnnnnnnnnnnnnnnnnnnnnnnnnnnnnnnnnnnnnnnnnnnnnnnnnnnnnnnnnnnnnnnnnnnnnnnnnnnnnnnnnnnnnnnnnnnnnnnnnnnnnnnnnnnnnnnnnnnnnnnnnnnnnnnnnnnnnnnnnnnnnnnnnnnnnnnnnnnnnnnnnnnnnnnnnnnnnnnnnnnnnnnnnnnnnnnnnnnnnnnnnnnnnnnnnnnnnnnnnnnnnnnnnnnnnnnnnnnnnnnnnnnnnnnnnnnnnnnnnnnnnnnnnnnnnnnnnnnnnnnnnnnnnnnnnnnnnnnnnnnnnnnnnnnnnnnnnnnnnnnnnnnnnnnnnnnnnnnnnnnnnnnnnnnnnnnnnnnnnnnnnnnnnnnnnnnnnnnnnnnnnnnnnnnnnnnnnnnnnnnnnnnnnnnnnnnnnnnnnnnnnnnnnnnnnnnnnnnnnnnnnnnnnnnnnnnnnnnnnnnnnnnnnnnnnnnnnnnnnnnnnnnnnnnnnnnnnnnnnnnnnnnnnnnnnnnnnnnnnnnnnnnnnnnnnnnnnnnnnnnnnnnnnnnnnnnnnnnnnnnnnnnnnnnnnnnnnnnnnnnnnnnnnnnnnnnnnnnnnnnnnnnnnnnnnnnnnnnnnnnnnnnnnnnnnnnnnnnnnnnnnnnnnnnnnnnnnnnnnnnnnnnnnnnnnnnnnnnnnnnnnnnnnnnnnnnnnnnnnnnnnnnnnnnnnnnnnnnnnnnnnnnnnnnnnnnnnnnnnnnnnnnnnnnnnnnnnnnnnnnnnnnnnnnnnnnnnnnnnnnnnnnnnnnnnnnnnnnnnnnnnnnnnnnnnnnnnnnnnnnnnnnnnnnnnnnnnnnnnnnnnnnnnnnnnnnnnnnnnnnnnnnnnnnnnnnnnnnnnnnnnnnnnnnnnnnnnnnnnnnnnnnnnnnnnnnnnnnnnnnnnnnnnnnnnnnnnnnnnnnnnnnnnnnnnnnnnnnnnnnnnnnnnnnnnnnnnnnnnnnnnnnnnnnnnnnnnnnnnnnnnnnnnnnnnnnnnnnnnnnnnnnnnnnnnnnnnnnnnnnnnnnnnnnnnnnnnnnnnnnnnnnnnnnnnnnnnnnnnnnnnnnnnnnnnnnnnnnnnnnnnnnnnnnnnnnnnnnnnnnnnnnnnnnnnnnnnnnnnnnnnnnnnnnnnnnnnnnnnnnnnnnnnnnnnnnnnnnnnnnnnnnnnnnnnnnnnnnnnnnnnnnnnnnnnnnnnnnnnnnnnnnnnnnnnnnnnnnnnnnnnnnnnnnnnnnnnnnnnnnnnnnnnnnnnnnnnnnnnnnnnnnnnnnnnnnnnnnnnnnnnnnnnnnnnnnnnnnnnnnnnnnnnnnnnnnnnnnnnnnnnnnnnnnnnnnnnnnnnnnnnnnnnnnnnnnnnnnnnnnnnnnnnnnnnnnnnnnnnnnnnnnnnnnnnnnnnnnnnnnnnnnnnnnnnnnnnnnnnnnnnnnnnnnnnnnnnnnnnnnnnnnnnnnnnnnnnnnnnnnnnnnnnnnnnnnnnnnnnnnnnnnnnnnnnnnnnnnnnnnnnnnnnnnnnnnnnnnnnnnnnnnnnnnnnnnnnnnnnnnnnnnnnnnnnnnnnnnnnnnnnnnnnnnnnnnnnnnnnnnnnnnnnnnnnnnnnnnnnnnnnnnnnnnnnnnnnnnnnnnnnnnnnnnnnnnnnnnnnnnnnnnnnnnnnnnnnnnnnnnnnnnnnnnnnnnnnnnnnnnnnnnnnnnnnnnnnnnnnnnnnnnnnnnnnnnnnnnnnnnnnnnnnnnnnnnnnnnnnnnnnnnnnnnnnnnnnnnnnnnnnnnnnnnnnnnnnnnnnnnnnnnnnnnnnnnnnnnnnnnnnnnnnnnnnnnnnnnnnnnnnnnnnnnnnnnnnnnnnnnnnnnnnnnnnnnnnnnnnnnnnnnnnnnnnnnnnnnnnnnnnnnnnnnnnnnnnnnnnnnnnnnnnnnnnnnnnnnnnnnnnnnnnnnnnnnnnnnnnnnnnnnnnnnnnnnnnnnnnnnnnnnnnnnnnnnnnnnnnnnnnnnnnnnnnnnnnnnnnnnnnnnnnnnnnnnnnnnnnnnnnnnnnnnnnnnnnnnnnnnnnnnnnnnnnnnnnnnnnnnnnnnnnnnnnnnnnnnnnnnnnnnnnnnnnnnnnnnnnnnnnnnnnnnnnnnnnnnnnnnnnnnnnnnnnnnnnnnnnnnnnnnnnnnnnnnnnnnnnnnnnnnnnnnnnnnnnnnnnnnnnnnnnnnnnnnnnnnnnnnnnnnnnnnnnnnnnnnnnnnnnnnnnnnnnnnnnnnnnnnnnnnnnnnnnnnnnnnnnnnnnnnnnnnnnnnnnnnnnnnnnnnnnnnnnnnnnnnnnnnnnnnnnnnnnnnnnnnnnnnnnnnnnnnnnnnnnnnnnnnnnnnnnnnnnnnnnnnnnnnnnnnnnnnnnnnnnnnnnnnnnnnnnnnnnnnnnnnnnnnnnnnnnnnnnnnnnnnnnnnnnnnnnnnnnnnnnnnnnnnnnnnnnnnnnnnnnnnnnnnnnnnnnnnnnnnnnnnnnnnnnnnnnnnnnnnnnnnnnnnnnnnnnnnnnnnnnnnnnnnnnnnnnnnnnnnnnnnnnnnnnnnnnnnnnnnnnnnnnnnnnnnnnnnnnnnnnnnnnnnnnnnnnnnnnnnnnnnnnnnnnnnnnnnnnnnnnnnnnnnnnnnnnnnnnnnnnnnnnnnnnnnnnnnnnnnnnnnnnnnnnnnnnnnnnnnnnnnnnnnnnnnnnnnnnnnnnnnnnnnnnnnnnnnnnnnnnnnnnnnnnnnnnnnnnnnnnnnnnnnnnnnnnnnnnnnnnnnnnnnnnnnnnnnnnnnnnnnnnnnnnnnnnnnnnnnnnnnnnnnnnnnnnnnnnnnnnnnnnnnnnnnnnnnnnnnnnnnnnnnnnnnnnnnnnnnnnnnnnnnnnnnnnnnnnnnnnnnnnnnnnnnnnnnnnnnnnnnnnnnnnnnnnnnnnnnnnnnnnnnnnnnnnnnnnnnnnnnnnnnnnnnnnnnnnnnnnnnnnnnnnnnnnnnnnnnnnnnnnnnnnnnnnnnnnnnnnnnnnnnnnnnnnnnnnnnnnnnnnnnnnnnnnnnnnnnnnnnnnnnnnnnnnnnnnnnnnnnnnnnnnnnnnnnnnnnnnnnnnnnnnnnnnnnnnnnnnnnnnnnnnnnnnnnnnnnnnnnnnnnnnnnnnnnnnnnnnnnnnnnnnnnnnnnnnnnnnnnnnnnnnnnnnnnnnnnnnnnnnnnnnnnnnnnnnnnnnnnnnnnnnnnnnnnnnnnnnnnnnnnnnnnnnnnnnnnnnnnnnnnnnnnnnnnnnnnnnnnnnnnnnnnnnnnnnnnnnnnnnnnnnnnnnnnnnnnnnnnnnnnnnnnnnnnnnnnnnnnnnnnnnnnnnnnnnnnnnnnnnnnnnnnnnnnnnnnnnnnnnnnnnnnnnnnnnnnnnnnnnnnnnnnnnnnnnnnnnnnnnnnnnnnnnnnnnnnnnnnnnnnnnnnnnnnnnnnnnnnnnnnnnnnnnnnnnnnnnnnnnnnnnnnnnnnnnnnnnnnnnnnnnnnnnnnnnnnnnnnnnnnnnnnnnnnnnnnnnnnnnnnnnnnnnnnnnnnnnnnnnnnnnnnnnnnnnnnnnnnnnnnnnnnnnnnnnnnnnnnnnnnnnnnnnnnnnnnnnnnnnnnnnnnnnnnnnnnnnnnnnnnnnnnnnnnnnnnnnnnnnnnnnnnnnnnnnnnnnnnnnnnnnnnnnnnnnnnnnnnnnnnnnnnnnnnnnnnnnnnnnnnnnnnnnnnnnnnnnnnnnnnnnnnnnnnnnnnnnnnnnnnnnnnnnnnnnnnnnnnnnnnnnnnnnnnnnnnnnnnnnnnnnnnnnnnnnnnnnnnnnnnnnnnnnnnnnnnnnnnnnnnnnnnnnnnnnnnnnnnnnnnnnnnnnnnnnnnnnnnnnnnnnnnnnnnnnnnnnnnnnnnnnnnnnnnnnnnnnnnnnnnnnnnnnnnnnnnnnnnnnnnnnnnnnnnnnnnnnnnnnnnnnnnnnnnnnnnnnnnnnnnnnnnnnnnnnnnnnnnnnnnnnnnnnnnnnnnnnnnnnnnnnnnnnnnnnnnnnnnnnnnnnnnnnnnnnnnnnnnnnnnnnnnnnnnnnnnnnnnnnnnnnnnnnnnnnnnnnnnnnnnnnnnnnnnnnnnnnnnnnnnnnnnnnnnnnnnnnnnnnnnnnnnnnnnnnnnnnnnnnnnnnnnnnnnnnnnnnnnnnnnnnnnnnnnnnnnnnnnnnnnnnnnnnnnnnnnnnnnnnnnnnnnnnnnnnnnnnnnnnnnnnnnnnnnnnnnnnnnnnnnnnnnnnnnnnnnnnnnnnnnnnnnnnnnnnnnnnnnnnnnnnnnnnnnnnnnnnnnnnnnnnnnnnnnnnnnnnnnnnnnnnnnnnnnnnnnnnnnnnnnnnnnnnnnnnnnnnnnnnnnnnnnnnnnnnnnnnnnnnnnnnnnnnnnnnnnnnnnnnnnnnnnnnnnnnnnnnnnnnnnnnnnnnnnnnnnnnnnnnnnnnnnnnnnnnnnnnnnnnnnnnnnnnnnnnnnnnnnnnnnnnnnnnnnnnnnnnnnnnnnnnnnnnnnnnnnnnnnnnnnnnnnnnnnnnnnnnnnnnnnnnnnnnnnnnnnnnnnnnnnnnnnnnnnnnnnnnnnnnnnnnnnnnnnnnnnnnnnnnnnnnnnnnnnnnnnnnnnnnnnnnnnnnnnnnnnnnnnnnnnnnnnnnnnnnnnnnnnnnnnnnnnnnnnnnnnnnnnnnnnnnnnnnnnnnnnnnnnnnnnnnnnnnnnnnnnnnnnnnnnnnnnnnnnnnnnnnnnnnnnnnnnnnnnnnnnnnnnnnnnnnnnnnnnnnnnnnnnnnnnnnnnnnnnnnnnnnnnnnnnnnnnnnnnnnnnnnnnnnnnnnnnnnnnnnnnnnnnnnnnnnnnnnnnnnnnnnnnnnnnnnnnnnnnnnnnnnnnnnnnnnnnnnnnnnnnnnnnnnnnnnnnnnnnnnnnnnnnnnnnnnnnnnnnnnnnnnnnnnnnnnnnnnnnnnnnnnnnnnnnnnnnnnnnnnnnnnnnnnnnnnnnnnnnnnnnnnnnnnnnnnnnnnnnnnnnnnnnnnnnnnnnnnnnnnnnnnnnnnnnnnnnnnnnnnnnnnnnnnnnnnnnnnnnnnnnnnnnnnnnnnnnnnnnnnnnnnnnnnnnnnnnnnnnnnnnnnnnnnnnnnnnnnnnnnnnnnnnnnnnnnnnnnnnnnnnnnnnnnnnnnnnnnnnnnnnnnnnnnnnnnnnnnnnnnnnnnnnnnnnnnnnnnnnnnnnnnnnnnnnnnnnnnnnnnnnnnnnnnnnnnnnnnnnnnnnnnnnnnnnnnnnnnnnnnnnnnnnnnnnnnnnnnnnnnnnnnnnnnnnnnnnnnnnnnnnnnnnnnnnnnnnnnnnnnnnnnnnnnnnnnnnnnnnnnnnnnnnnnnnnnnnnnnnnnnnnnnnnnnnnnnnnnnnnnnnnnnnnnnnnnnnnnnnnnnnnnnnnnnnnnnnnnnnnnnnnnnnnnnnnnnnnnnnnnnnnnnnnnnnnnnnnnnnnnnnnnnnnnnnnnnnnnnnnnnnnnnnnnnnnnnnnnnnnnnnnnnnnnnnnnnnnnnnnnnnnnnnnnnnnnnnnnnnnnnnnnnnnnnnnnnnnnnnnnnnnnnnnnnnnnnnnnnnnnnnnnnnnnnnnnnnnnnnnnnnnnnnnnnnnnnnnnnnnnnnnnnnnnnnnnnnnnnnnnnnnnnnnnnnnnnnnnnnnnnnnnnnnnnnnnnnnnnnnnnnnnnnnnnnnnnnnnnnnnnnnnnnnnnnnnnnnnnnnnnnnnnnnnnnnnnnnnnnnnnnnnnnnnnnnnnnnnnnnnnnnnnnnnnnnnnnnnnnnnnnnnnnnnnnnnnnnnnnnnnnnnnnnnnnnnnnnnnnnnnnnnnnnnnnnnnnnnnnnnnnnnnnnnnnnnnnnnnnnnnnnnnnnnnnnnnnnnnnnnnnnnnnnnnnnnnnnnnnnnnnnnnnnnnnnnnnnnnnnnnnnnnnnnnnnnnnnnnnnnnnnnnnnnnnnnnnnnnnnnnnnnnnnnnnnnnnnnnnnnnnnnnnnnnnnnnnnnnnnnnnnnnnnnnnnnnnnnnnnnnnnnnnnnnnnnnnnnnnnnnnnnnnnnnnnnnnnnnnnnnnnnnnnnnnnnnnnnnnnnnnnnnnnnnnnnnnnnnnnnnnnnnnnnnnnnnnnnnnnnnnnnnnnnnnnnnnnnnnnnnnnnnnnnnnnnnnnnnnnnnnnnnnnnnnnnnnnnnnnnnnnnnnnnnnnnnnnnnnnnnnnnnnnnnnnnnnnnnnnnnnnnnnnnnnnnnnnnnnnnnnnnnnnnnnnnnnnnnnnnnnnnnnnnnnnnnnnnnnnnnnnnnnnnnnnnnnnnnnnnnnnnnnnnnnnnnnnnnnnnnnnnnnnnnnnnnnnnnnnnnnnnnnnnnnnnnnnnnnnnnnnnnnnnnnnnnnnnnnnnnnnnnnnnnnnnnnnnnnnnnnnnnnnnnnnnnnnnnnnnnnnnnnnnnnnnnnnnnnnnnnnnnnnnnnnnnnnnnnnnnnnnnnnnnnnnnnnnnnnnnnnnnnnnnnnnnnnnnnnnnnnnnnnnnnnnnnnnnnnnnnnnnnnnnnnnnnnnnnnnnnnnnnnnnnnnnnnnnnnnnnnnnnnnnnnnnnnnnnnnnnnnnnnnnnnnnnnnnnnnnnnnnnnnnnnnnnnnnnnnnnnnnnnnnnnnnnnnnnnnnnnnnnnnnnnnnnnnnnnnnnnnnnnnnnnnnnnnnnnnnnnnnnnnnnnnnnnnnnnnnnnnnnnnnnnnnnnnnnnnnnnnnnnnnnnnnnnnnnnnnnnnnnnnnnnnnnnnnnnnnnnnnnnnnnnnnnnnnnnnnnnnnnnnnnnnnnnnnnnnnnnnnnnnnnnnnnnnnnnnnnnnnnnnnnnnnnnnnnnnnnnnnnnnnnnnnnnnnnnnnnnnnnnnnnnnnnnnnnnnnnnnnnnnnnnnnnnnnnnnnnnnnnnnnnnnnnnnnnnnnnnnnnnnnnnnnnnnnnnnnnnnnnnnnnnnnnnnnnnnnnnnnnnnnnnnnnnnnnnnnnnnnnnnnnnnnnnnnnnnnnnnnnnnnnnnnnnnnnnnnnnnnnnnnnnnnnnnnnnnnnnnnnnnnnnnnnnnnnnnnnnnnnnnnnnnnnnnnnnnnnnnnnnnnnnnnnnnnnnnnnnnnnnnnnnnnnnnnnnnnnnnnnnnnnnnnnnnnnnnnnnnnnnnnnnnnnnnnnnnnnnnnnnnnnnnnnnnnnnnnnnnnnnnnnnnnnnnnnnnnnnnnnnnnnnnnnnnnnnnnnnnnnnnnnnnnnnnnnnnnnnnnnnnnnnnnnnnnnnnnnnnnnnnnnnnnnnnnnnnnnnnnnnnnnnnnnnnnnnnnnnnnnnnnnnnnnnnnnnnnnnnnnnnnnnnnnnnnnnnnnnnnnnnnnnnnnnnnnnnnnnnnnnnnnnnnnnnnnnnnnnnnnnnnnnnnnnnnnnnnnnnnnnnnnnnnnnnnnnnnnnnnnnnnnnnnnnnnnnnnnnnnnnnnnnnnnnnnnnnnnnnnnnnnnnnnnnnnnnnnnnnnnnnnnnnnnnnnnnnnnnnnnnnnnnnnnnnnnnnnnnnnnnnnnnnnnnnnnnnnnnnnnnnnnnnnnnnnnnnnnnnnnnnnnnnnnnnnnnnnnnnnnnnnnnnnnnnnnnnnnnnnnnnnnnnnnnnnnnnnnnnnnnnnnnnnnnnnnnnnnnnnnnnnnnnnnnnnnnnnnnnnnnnnnnnnnnnnnnnnnnnnnnnnnnnnnnnnnnnnnnnnnnnnnnnnnnnnnnnnnnnnnnnnnnnnnnnnnnnnnnnnnnnnnnnnnnnnnnnnnnnnnnnnnnnnnnnnnnnnnnnnnnnnnnnnnnnnnnnnnnnnnnnnnnnnnnnnnnnnnnnnnnnnnnnnnnnnnnnnnnnnnnnnnnnnnnnnnnnnnnnnnnnnnnnnnnnnnnnnnnnnnnnnnnnnnnnnnnnnnnnnnnnnnnnnnnnnnnnnnnnnnnnnnnnnnnnnnnnnnnnnnnnnnnnnnnnnnnnnnnnnnnnnnnnnnnnnnnnnnnnnnnnnnnnnnnnnnnnnnnnnnnnnnnnnnnnnnnnnnnnnnnnnnnnnnnnnnnnnnnnnnnnnnnnnnnnnnnnnnnnnnnnnnnnnnnnnnnnnnnnnnnnnnnnnnnnnnnnnnnnnnnnnnnnnnnnnnnnnnnnnnnnnnnnnnnnnnnnnnnnnnnnnnnnnnnnnnnnnnnnnnnnnnnnnnnnnnnnnnnnnnnnnnnnnnnnnnnnnnnnnnnnnnnnnnnnnnnnnnnnnnnnnnnnnnnnnnnnnnnnnnnnnnnnnnnnnnnnnnnnnnnnnnnnnnnnnnnnnnnnnnnnnnnnnnnnnnnnnnnnnnnnnnnnnnnnnnnnnnnnnnnnnnnnnnnnnnnnnnnnnnnnnnnnnnnnnnnnnnnnnnnnnnnnnnnnnnnnnnnnnnnnnnnnnnnnnnnnnnnnnnnnnnnnnnnnnnnnnnnnnnnnnnnnnnnnnnnnnnnnnnnnnnnnnnnnnnnnnnnnnnnnnnnnnnnnnnnnnnnnnnnnnnnnnnnnnnnnnnnnnnnnnnnnnnnnnnnnnnnnnnnnnnnnnnnnnnnnnnnnnnnnnnnnnnnnnnnnnnnnnnnnnnnnnnnnnnnnnnnnnnnnnnnnnnnnnnnnnnnnnnnnnnnnnnnnnnnnnnnnnnnnnnnnnnnnnnnnnnnnnnnnnnnnnnnnnnnnnnnnnnnnnnnnnnnnnnnnnnnnnnnnnnnnnnnnnnnnnnnnnnnnnnnnnnnnnnnnnnnnnnnnnnnnnnnnnnnnnnnnnnnnnnnnnnnnnnnnnnnnnnnnnnnnnnnnnnnnnnnnnnnnnnnnnnnnnnnnnnnnnnnnnnnnnnnnnnnnnnnnnnnnnnnnnnnnnnnnnnnnnnnnnnnnnnnnnnnnnnnnnnnnnnnnnnnnnnnnnnnnnnnnnnnnnnnnnnnnnnnnnnnnnnnnnnnnnnnnnnnnnnnnnnnnnnnnnnnnnnnnnnnnnnnnnnnnnnnnnnnnnnnnnnnnnnnnnnnnnnnnnnnnnnnnnnnnnnnnnnnnnnnnnnnnnnnnnnnnnnnnnnnnnnnnnnnnnnnnnnnnnnnnnnnnnnnnnnnnnnnnnnnnnnnnnnnnnnnnnnnnnnnnnnnnnnnnnnnnnnnnnnnnnnnnnnnnnnnnnnnnnnnnnnnnnnnnnnnnnnnnnnnnnnnnnnnnnnnnnnnnnnnnnnnnnnnnnnnnnnnnnnnnnnnnnnnnnnnnnnnnnnnnnnnnnnnnnnnnnnnnnnnnnnnnnnnnnnnnnnnnnnnnnnnnnnnnnnnnnnnnnnnnnnnnnnnnnnnnnnnnnnnnnnnnnnnnnnnnnnnnnnnnnnnnnnnnnnnnnnnnnnnnnnnnnnnnnnnnnnnnnnnnnnnnnnnnnnnnnnnnnnnnnnnnnnnnnnnnnnnnnnnnnnnnnnnnnnnnnnnnnnnnnnnnnnnnnnnnnnnnnnnnnnnnnnnnnnnnnnnnnnnnnnnnnnnnnnnnnnnnnnnnnnnnnnnnnnnnnnnnnnnnnnnnnnnnnnnnnnnnnnnnnnnnnnnnnnnnnnnnnnnnnnnnnnnnnnnnnnnnnnnnnnnnnnnnnnnnnnnnnnnnnnnnnnnnnnnnnnnnnnnnnnnnnnnnnnnnnnnnnnnnnnnnnnnnnnnnnnnnnnnnnnnnnnnnnnnnnnnnnnnnnnnnnnnnnnnnnnnnnnnnnnnnnnnnnnnnnnnnnnnnnnnnnnnnnnnnnnnnnnnnnnnnnnnnnnnnnnnnnnnnnnnnnnnnnnnnnnnnnnnnnnnnnnnnnnnnnnnnnnnnnnnnnnnnnnnnnnnnnnnnnnnnnnnnnnnnnnnnnnnnnnnnnnnnnnnnnnnnnnnnnnnnnnnnnnnnnnnnnnnnnnnnnnnnnnnnnnnnnnnnnnnnnnnnnnnnnnnnnnnnnnnnnnnnnnnnnnnnnnnnnnnnnnnnnnnnnnnnnnnnnnnnnnnnnnnnnnnnnnnnnnnnnnnnnnnnnnnnnnnnnnnnnnnnnnnnnnnnnnnnnnnnnnnnnnnnnnnnnnnnnnnnnnnnnnnnnnnnnnnnnnnnnnnnnnnnnnnnnnnnnnnnnnnnnnnnnnnnnnnnnnnnnnnnnnnnnnnnnnnnnnnnnnnnnnnnnnnnnnnnnnnnnnnnnnnnnnnnnnnnnnnnnnnnnnnnnnnnnnnnnnnnnnnnnnnnnnnnnnnnnnnnnnnnnnnnnnnnnnnnnnnnnnnnnnnnnnnnnnnnnnnnnnnnnnnnnnnnnnnnnnnnnnnnnnnnnnnnnnnnnnnnnnnnnnnnnnnnnnnnnnnnnnnnnnnnnnnnnnnnnnnnnnnnnnnnnnnnagagaaagaagttaacattagtgagcggtgcatcctatcaactcagaattttaccatagcggagaagcgctaatccttcgcgagcactggcaatctgcgggtgtaaatgcttgtgcggtggccactggtggcgcggaagcccggcacccatgcccatctaccttttaaggtgagaaatccgcaaacagatcgcattggccaaaacgctctcggcgggaccttgaagagtcgcagttaccctaaccacctgtatggcttgaaccggcactttcccccgaggtttttcttatcccagcaaaatcgggataacggttgccgatgggttaaatattctgaaatgttcatactggaccattagcagcattaccacacacattgacacattggacgtgtcctcagcttcagtttcactgcaggctaaaccgtggctgataaacttacatcaaagtatagctgatggtagctatgctacggtttcgtactttgcaaggcgctgacgcgtggtactgtcttggagcttataccatatcactggtaggcggcaaaatttaagtttgtttgcttagaatgaatatgaagtagcgaatggtgccgtttgcaaagtgttaccgaggtaatgggcctactttggctcactactttagctcacatgtgtgcgcacgtgtgtgaggaagcgtagcttagtttaaactagaattaattatactcggacctccgagtatagattaatctaaataaacgatccaaataatgtttttgggttaaaatgagaactgctatttttgttttatgtttctgacttccgacacgacgtctgttagtagccctgacgcctcacgtacattgccgaagtagcggtcgggctcctccacgaacaggagcgtccaggtctcgatcgaaacaactcggtcttcgcagtggcaccggcagagccgtactcgtagctcctcgaccagcgtacctcgcgcgtgtgaaggcgtctatagaaggcaatgatacgagagaaaagaaagttaacattagtgagcggtgcatcctatcaactcagaattttaccatagcggagaagcgctaatccttcgcgagcactggcaatctgcgggtgtaaatgcttgtgcggtggccactggtggcgcggaagcccggcacccatgcccatctaccttttaaggtgagaaatccgcaaacagatcgcattggccaaaacgctctcggcgggaccttgaagagtcgcagttaccctaaccacctgtatggcttgaaccggcactttcccccgaggtttttcttatcccagcaaaatcgggataacggttgccgatgggttaaatattctgaaatgttcatactggaccattagcagcattaccacacacattgacacattggacgtgtcctcagcttcagtttcactgcaggctaaaccgtggctgataaacttacatcaaagtatagctgatggtagctatgctacggtttcgtactttgcaaggcgctgacgcgtggtactgtcttggagcttataccatatcactggtaggcggcaaaatttaagtttgtttgcttagaatgaatatgaagtagcgaatggtgccgtttgcaaagtgttaccgaggtaatgggcctactttggctcactactttagctcacatgtgtgcgcacgtgtgtgaggaagcgtagcttagtttaaactagaattaattatactcggacctccgagtatagattaatctaaataaacgatccaaataatgtttttgggttaaaatgagaactgctatttttgttttatgtttctgacttccgacacgacgtctgttagtagccctgacgcctcacgtacattgccgaagtagcggtcgggctcctccacgaacaggagcgtccaggtctcgatcgaaacaactcggtcttcgcagtggcaccggcagagccgtactcgtagctcctcgaccagcgtacctcgcgcgtgtgaaggcgtctatagaaggcaatgatacgagagaaaaaaaagttaacattagtgagcggtgcatcctatcaactcagaattttaccatagcggagaagcgctaatccttcgcgagcactggcaatctgcgggtgtaaatgcttgtgcggtggccactggtggcgcggaagcccggcacccatgcccatctaccttttaaggtgagaaatccgcaaacagatcgcattggccaaaacgctctcggcgggaccttgaagagtcgcagttaccctaaccacctgtatggcttgaaccggcactttcccccgaggtttttcttatcccagcaaaatcgggataacggttgccgatgggttaaatattctgaaatgttcatactggaccattagcagcattaccacacacattgacacattggacgtgtcctcagcttcagtttcactgcaggctaaaccgtggctgataaacttacatcaaagtatagctgatggtagctatgctacggtttcgtactttgcaaggcgctgacgcgtggtactgtcttggagcttataccatatcactggtaggcggcaaaatttaagtttgtttgcttagaatgaatatgaagtagcgaatggtgccgtttgcaaagtgttaccgaggtaatgggcctactttggctcactactttagctcacatgtgtgcgcacgtgtgtgaggaagcgtagcttagtttaaactagaattaattatactcggacctccgagtatagattaatctaaataaacgatccaaataatgtttttgggttaaaatgagaactgctatttttgttttatgtttctgacttccgacacgacgtctgttagtagccctgacgcctcacgtacattgccgaagtagcggtcgggctcctccacgaacaggagcgtccaggtctcgatcgaaacaactcggtcttcgcagtggcaccggcagagccgtactcgtagctcctcgaccagcgtacctcgcgcgtgtgaaggcgtctatagaaggcaatgatacgaggggatcctnnnnnnnnnnnnnnnnnnnnnnnnnnnnnnnnnnnnnnnnnnnnnnnnnnnnnnnnnnnnnnnnnnnnnnnnnnnnnnnnnnnnnnnnnnnnnnnnnnnnnnnnnnnnnnnnnnnnnnnnnnnnnnnnnnnnnnnnnnnnnnnnnnnnnnnnnnnnnnnnnnnnnnnnnnnnnnnnnnnnnnnnnnnnnnnnnnnnnnnnnnnnnnnnnnnnnnnnnnnnnnnnnnnnnnnnnnnnnnnnnnnnnnnnnnnnnnnnnnnnnnnnnnnnnnnnnnnnnnnnnnnnnnnnnnnnnnnnnnnnnnnnnnnnnnnnnnnnnnnnnnnnnnnnnnnnnnnnnnnnnnnnnnnnnnnnnnnnnnnnnnnnnnnnnnnnnnnnnnnnnnnnnnnnnnnnnnnnnnnnnnnnnnnnnnnnnnnnnnnnnnnnnnnnnnnnnnnnnnnnnnnnnnnnnnnnnnnnnnnnnnnnnnnnnnnnnnnnnnnnnnnnnnnnnnnnnnnnnnnnnnnnnnnnnnnnnnnnnnnnnnnnnnnnnnnnnnnnnnnnnnnnnnnnnnnnnnnnnnnnnnnnnnnnnnnnnnnnnnnnnnnnnnnnnnnnnnnnnnnnnnnnnnnnnnnnnnnnnnnnnnnnnnnnnnnnnnnnnnnnnnnnnnnnnnnnnnnnnnnnnnnnnnnnnnnnnnnnnnnnnnnnnnnnnnnnnnnnnnnnnnnnnnnnnnnnnnnnnnnnnnnnnnnnnnnnnnnnnnnnnnnnnnnnnnnnnnnnnnnnnnnnnnnnnnnnnnnnnnnnnnnnnnnnnnnnnnnnnnnnnnnnnnnnnnnnnnnnnnnnnnnnnnnnnnnnnnnnnnnnnnnnnnnnnnnnnnnnnnnnnnnnnnnnnnnnnnnnnnnnnnnnnnnnnnnnnnnnnnnnnnnnnnnnnnnnnnnnnnnnnnnnnnnnnnnnnnnnnnnnnnnnnnnnnnnnnnnnnnnnnnnnnnnnnnnnnnnnnnnnnnnnnnnnnnnnnnnnnnnnnnnnnnnnnnnnnnnnnnnnnnnnnnnnnnnnnnnnnnnnnnnnnnnnnnnnnnnnnnnnnnnnnnnnnnnnnnnnnnnnnnnnnnnnnnnnnnnnnnnnnnnnnnnnnnnnnnnnnnnnnnnnnnnnnnnnnnnnnnnnnnnnnnnnnnnnnnnnnnnnnnnnnnnnnnnnnnnnnnnnnnnnnnnnnnnnnnnnnnnnnnnnnnnnnnnnnnnnnnnnnnnnnnnnnnnnnnnnnnnnnnnnnnnnnnnnnnnnnnnnnnnnnnnnnnnnnnnnnnnnnnnnnnnnnnnnnnnnnnnnnnnnnnnnnnnnnnnnnnnnnnnnnnnnnnnnnnnnnnnnnnnnnnnnnnnnnnnnnnnnnnnnnnnnnnnnnnnnnnnnnnnnnnnnnnnnnnnnnnnnnnnnnnnnnnnnnnnnnnnnnnnnnnnnnnnnnnnnnnnnnnnnnnnnnnnnnnnnnnnnnnnnnnnnnnnnnnnnnnnnnnnnnnnnnnnnnnnnnnnnnnnnnnnnnnnnnnnnnnnnnnnnnnnnnnnnnnnnnnnnnnnnnnnnnnnnnnnnnnnnnnnnnnnnnnnnnnnnnnnnnnnnnnnnnnnnnnnnnnnnnnnnnnnnnnnnnnnnnnnnnnnnnnnnnnnnnnnnnnnnnnnnnnnnnnnnnnnnnnnnnnnnnnnnnnnnnnnnnnnnnnnnnnnnnnnnnnnnnnnnnnnnnnnnnnnnnnnnnnnnnnnnnnnnnnnnnnnnnnnnnnnnnnnnnnnnnnnnnnnnnnnnnnnnnnnnnnnnnnnnnnnnnnnnnnnnnnnnnnnnnnnnnnnnnnnnnnnnnnnnnnnnnnnnnnnnnnnnnnnnnnnnnnnnnnnnnnnnnnnnnnnnnnnnnnnnnnnnnnnnnnnnnnnnnnnnnnnnnnnnnnnnnnnnnnnnnnnnnnnnnnnnnnnnnnnnnnnnnnnnnnnnnnnnnnnnnnnnnnnnnnnnnnnnnnnnnnnnnnnnnnnnnnnnnnnnnnnnnnnnnnnnnnnnnnnnnnnnnnnnnnnnnnnnnnnnnnnnnnnnnnnnnnnnnnnnnnnnnnnnnnnnnnnnnnnnnnnnnnnnnnnnnnnnnnnnnnnnnnnnnnnnnnnnnnnnnnnnnnnnnnnnnnnnnnnnnnnnnnnnnnnnnnnnnnnnnnnnnnnnnnnnnnnnnnnnnnnnnnnnnnnnnnnnnnnnnnnnnnnnnnnnnnnnnnnnnnnnnnnnnnnnnnnnnnnnnnnnnnnnnnnnnnnnnnnnnnnnnnnnnnnnnnnnnnnnnnnnnnnnnnnnnnnnnnnnnnnnnnnnnnnnnnnnnnnnnnnnnnnnnnnnnnnnnnnnnnnnnnnnnnnnnnnnnnnnnnnnnnnnnnnnnnnnnnnnnnnnnnnnnnnnnnnnnnnnnnnnnnnnnnnnnnnnnnnnnnnnnnnnnnnnnnnnnnnnnnnnnnnnnnnnnnnnnnnnnnnnnnnnnnnnnnnnnnnnnnnnnnnnnnnnnnnnnnnnnnnnnnnnnnnnnnnnnnnnnnnnnnnnnnnnnnnnnnnnnnnnnnnnnnnnnnnnnnnnnnnnnnnnnnnnnnnnnnnnnnnnnnnnnnnnnnnnnnnnnnnnnnnnnnnnnnnnnnnnnnnnnnnnnnnnnnnnnnnnnnnnnnnnnnnnnnnnnnnnnnnnnnnnnnnnnnnnnnnnnnnnnnnnnnnnnnnnnnnnnnnnnnnnnnnnnnnnnnnnnnnnnnnnnnnnnnnnnnnnnnnnnnnnnnnnnnnnnnnnnnnnnnnnnnnnnnnnnnnnnnnnnnnnnnnnnnnnnnnnnnnnnnnnnnnnnnnnnnnnnnnnnnnnnnnnnnnnnnnnnnnnnnnnnnnnnnnnnnnnnnnnnnnnnnnnnnnnnnnnnnnnnnnnnnnnnnnnnnnnnnnnnnnnnnnnnnnnnnnnnnnnnnnnnnnnnnnnnnnnnnnnnnnnnnnnnnnnnnnnnnnnnnnnnnnnnnnnnnnnnnnnnnnnnnnnnnnnnnnnnnnnnnnnnnnnnnnnnnnnnnnnnnnnnnnnnnnnnnnnnnnnnnnnnnnnnnnnnnnnnnnnnnnnnnnnnnnnnnnnnnnnnnnnnnnnnnnnnnnnnnnnnnnnnnnnnnnnnnnnnnnnnnnnnnnnnnnnnnnnnnnnnnnnnnnnnnnnnnnnnnnnnnnnnnnnnnnnnnnnnnnnnnnnnnnnnnnnnnnnnnnnnnnnnnnnnnnnnnnnnnnnnnnnnnnnnnnnnnnnnnnnnnnnnnnnnnnnnnnnnnnnnnnnnnnnnnnnnnnnnnnnnnnnnnnnnnnnnnnnnnnnnnnnnnnnnnnnnnnnnnnnnnnnnnnnnnnnnnnnnnnnnnnnnnnnnnnnnnnnnnnnnnnnnnnnnnnnnnnnnnnnnnnnnnnnnnnnnnnnnnnnnnnnnnnnnnnnnnnnnnnnnnnnnnnnnnnnnnnnnnnnnnnnnnnnnnnnnnnnnnnnnnnnnnnnnnnnnnnnnnnnnnnnnnnnnnnnnnnnnnnnnnnnnnnnnnnnnnnnnnnnnnnnnnnnnnnnnnnnnnnnnnnnnnnnnnnnnnnnnnnnnnnnnnnnnnnnnnnnnnnnnnnnnnnnnnnnnnnnnnnnnnnnnnnnnnnnnnnnnnnnnnnnnnnnnnnnnnnnnnnnnnnnnnnnnnnnnnnnnnnnnnnnnnnnnnnnnnnnnnnnnnnnnnnnnnnnnnnnnnnnnnnnnnnnnnnnnnnnnnnnnnnnnnnnnnnnnnnnnnnnnnnnnnnnnnnnnnnnnnnnnnnnnnnnnnnnnnnnnnnnnnnnnnnnnnnnnnnnnnnnnnnnnnnnnnnnnnnnnnnnnnnnnnnnnnnnnnnnnnnnnnnnnnnnnnnnnnnnnnnnnnnnnnnnnnnnnnnnnnnnnnnnnnnnnnnnnnnnnnnnnnnnnnnnnnnnnnnnnnnnnnnnnnnnnnnnnnnnnnnnnnnnnnnnnnnnnnnnnnnnnnnnnnnnnnnnnnnnnnnnnnnnnnnnnnnnnnnnnnnnnnnnnnnnnnnnnnnnnnnnnnnnnnnnnnnnnnnnnnnnnnnnnnnnnnnnnnnnnnnnnnnnnnnnnnnnnnnnnnnnnnnnnnnnnnnnnnnnnnnnnnnnnnnnnnnnnnnnnnnnnnnnnnnnnnnnnnnnnnnnnnnnnnnnnnnnnnnnnnnnnnnnnnnnnnnnnnnnnnnnnnnnnnnnnnnnnnnnnnnnnnnnnnnnnnnnnnnnnnnnnnnnnnnnnnnnnnnnnnnnnnnnnnnnnnnnnnnnnnnnnnnnnnnnnnnnnnnnnnnnnnnnnnnnnnnnnnnnnnnnnnnnnnnnnnnnnnnnnnnnnnnnnnnnnnnnnnnnnnnnnnnnnnnnnnnnnnnnnnnnnnnnnnnnnnnnnnnnnnnnnnnnnnnnnnnnnnnnnnnnnnnnnnnnnnnnnnnnnnnnnnnnnnnnnnnnnnnnnnnnnnnnnnnnnnnnnnnnnnnnnnnnnnnnnnnnnnnnnnnnnnnnnnnnnnnnnnnnnnnnnnnnnnnnnnnnnnnnnnnnnnnnnnnnnnnnnnnnnnnnnnnnnnnnnnnnnnnnnnnnnnnnnnnnnnnnnnnnnnnnnnnnnnnnnnnnnnnnnnnnnnnnnnnnnnnnnnnnnnnnnnnnnnnnnnnnnnnnnnnnnnnnnnnnnnnnnnnnnnnnnnnnnnnnnnnnnnnnnnnnnnnnnnnnnnnnnnnnnnnnnnnnnnnnnnnnnnnnnnnnnnnnnnnnnnnnnnnnnnnnnnnnnnnnnnnnnnnnnnnnnnnnnnnnnnnnnnnnnnnnnnnnnnnnnnnnnnnnnnnnnnnnnnnnnnnnnnnnnnnnnnnnnnnnnnnnnnnnnnnnnnnnnnnnnnnnnnnnnnnnnnnnnnnnnnnnnnnnnnnnnnnnnnnnnnnnnnnnnnnnnnnnnnnnnnnnnnnnnnnnnnnnnnnnnnnnnnnnnnnnnnnnnnnnnnnnnnnnnnnnnnnnnnnnnnnnnnnnnnnnnnnnnnnnnnnnnnnnnnnnnnnnnnnnnnnnnnnnnnnnnnnnnnnnnnnnnnnnnnnnnnnnnnnnnnnnnnnnnnnnnnnnnnnnnnnnnnnnnnnnnnnnnnnnnnnnnnnnnnnnnnnnnnnnnnnnnnnnnnnnnnnnnnnnnnnnnnnnnnnnnnnnnnnnnnnnnnnnnnnnnnnnnnnnnnnnnnnnnnnnnnnnnnnnnnnnnnnnnnnnnnnnnnnnnnnnnnnnnnnnnnnnnnnnnnnnnnnnnnnnnnnnnnnnnnnnnnnnnnnnnnnnnnnnnnnnnnnnnnnnnnnnnnnnnnnnnnnnnnnnnnnnnnnnnnnnnnnnnnnnnnnnnnnnnnnnnnnnnnnnnnnnnnnnnnnnnnnnnnnnnnnnnnnnnnnnnnnnnnnnnnnnnnnnnnnnnnnnnnnnnnnnnnnnnnnnnnnnnnnnnnnnnnnnnnnnnnnnnnnnnnnnnnnnnnnnnnnnnnnnnnnnnnnnnnnnnnnnnnnnnnnnnnnnnnnnnnnnnnnnnnnnnnnnnnnnnnnnnnnnnnnnnnnnnnnnnnnnnnnnnnnnnnnnnnnnnnnnnnnnnnnnnnnnnnnnnnnnnnnnnnnnnnnnnnnnnnnnnnnnnnnnnnnnnnnnnnnnnnnnnnnnnnnnnnnnnnnnnnnnnnnnnnnnnnnnnnnnnnnnnnnnnnnnnnnnnnnnnnnnnnnnnnnnnnnnnnnnnnnnnnnnnnnnnnnnnnnnnnnnnnnnnnnnnnnnnnnnnnnnnnnnnnnnnnnnnnnnnnnnnnnnnnnnnnnnnnnnnnnnnnnnnnnnnnnnnnnnnnnnnnnnnnnnnnnnnnnnnnnnnnnnnnnnnnnnnnnnnnnnnnnnnnnnnnnnnnnnnnnnnnnnnnnnnnnnnnnnnnnnnnnnnnnnnnnnnnnnnnnnnnnnnnnnnnnnnnnnnnnnnnnnnnnnnnnnnnnnnnnnnnnnnnnnnnnnnnnnnnnnnnnnnnnnnnnnnnnnnnnnnnnnnnnnnnnnnnnnnnnnnnnnnnnnnnnnnnnnnnnnnnnnnnnnnnnnnnnnnnnnnnnnnnnnnnnnnnnnnnnnnnnnnnnnnnnnnnnnnnnnnnnnnnnnnnnnnnnnnnnnnnnnnnnnnnnnnnnnnnnnnnnnnnnnnnnnnnnnnnnnnnnnnnnnnnnnnnnnnnnnnnnnnnnnnnnnnnnnnnnnnnnnnnnnnnnnnnnnnnnnnnnnnnnnnnnnnnnnnnnnnnnnnnnnnnnnnnnnnnnnnnnnnnnnnnnnnnnnnnnnnnnnnnnnnnnnnnnnnnnnnnnnnnnnnnnnnnnnnnnnnnnnnnnnnnnnnnnnnnnnnnnnnnnnnnnnnnnnnnnnnnnnnnnnnnnnnnnnnnnnnnnnnnnnnnnnnnnnnnnnnnnnnnnnnnnnnnnnnnnnnnnnnnnnnnnnnnnnnnnnnnnnnnnnnnnnnnnnnnnnnnnnnnnnnnnnnnnnnnnnnnnnnnnnnnnnnnnnnnnnnnnnnnnnnnnnnnnnnnnnnnnnnnnnnnnnnnnnnnnnnnnnnnnnnnnnnnnnnnnnnnnnnnnnnnnnnnnnnnnnnnnnnnnnnnnnnnnnnnnnnnnnnnnnnnnnnnnnnnnnnnnnnnnnnnnnnnnnnnnnnnnnnnnnnnnnnnnnnnnnnnnnnnnnnnnnnnnnnnnnnnnnnnnnnnnnnnnnnnnnnnnnnnnnnnnnnnnnnnnnnnnnnnnnnnnnnnnnnnnnnnnnnnnnnnnnnnnnnnnnnnnnnnnnnnnnnnnnnnnnnnnnnnnnnnnnnnnnnnnnnnnnnnnnnnnnnnnnnnnnnnnnnnnnnnnnnnnnnnnnnnnnnnnnnnnnnnnnnnnnnnnnnnnnnnnnnnnnnnnnnnnnnnnnnnnnnnnnnnnnnnnnnnnnnnnnnnnnnnnnnnnnnnnnnnnnnnnnnnnnnnnnnnnnnnnnnnnnnnnnnnnnnnnnnnnnnnnnnnnnnnnnnnnnnnnnnnnnnnnnnnnnnnnnnnnnnnnnnnnnnnnnnnnnnnnnnnnnnnnnnnnnnnnnnnnnnnnnnnnnnnnnnnnnnnnnnnnnnnnnnnnnnnnnnnnnnnnnnnnnnnnnnnnnnnnnnnnnnnnnnnnnnnnnnnnnnnnnnnnnnnnnnnnnnnnnnnnnnnnnnnnnnnnnnnnnnnnnnnnnnnnnnnnnnnnnnnnnnnnnnnnnnnnnnnnnnnnnnnnnnnnnnnnnnnnnnnnnnnnnnnnnnnnnnnnnnnnnnnnnnnnnnnnnnnnnnnnnnnnnnnnnnnnnnnnnnnnnnnnnnnnnnnnnnnnnnnnnnnnnnnnnnnnnnnnnnnnnnnnnnnnnnnnnnnnnnnnnnnnnnnnnnnnnnnnnnnnnnnnnnnnnnnnnnnnnnnnnnnnnnnnnnnnnnnnnnnnnnnnnnnnnnnnnnnnnnnnnnnnnnnnnnnnnnnnnnnnnnnnnnnnnnnnnnnnnnnnnnnnnnnnnnnnnnnnnnnnnnnnnnnnnnnnnnnnnnnnnnnnnnnnnnnnnnnnnnnnnnnnnnnnnnnnnnnnnnnnnnnnnnnnnnnnnnnnnnnnnnnnnnnnnnnnnnnnnnnnnnnnnnnnnnnnnnnnnnnnnnnnnnnnnnnnnnnnnnnnnnnnnnnnnnnnnnnnnnnnnnnnnnnnnnnnnnnnnnnnnnnnnnnnnnnnnnnnnnnnnnnnnnnnnnnnnnnnnnnnnnnnnnnnnnnnnnnnnnnnnnnnnnnnnnnnnnnnnnnnnnnnnnnnnnnnnnnnnnnnnnnnnnnnnnnnnnnnnnnnnnnnnnnnnnnnnnnnnnnnnnnnnnnnnnnnnnnnnnnnnnnnnnnnnnnnnnnnnnnnnnnnnnnnnnnnnnnnnnnnnnnnnnnnnnnnnnnnnnnnnnnnnnnnnnnnnnnnnnnnnnnnnnnnnnnnnnnnnnnnnnnnnnnnnnnnnnnnnnnnnnnnnnnnnnnnnnnnnnnnnnnnnnnnnnnnnnnnnnnnnnnnnnnnnnnnnnnnnnnnnnnnnnnnnnnnnnnnnnnnnnnnnnnnnnnnnnnnnnnnnnnnnnnnnnnnnnnnnnnnnnnnnnnnnnnnnnnnnnnnnnnnnnnnnnnnnnnnnnnnnnnnnnnnnnnnnnnnnnnnnnnnnnnnnnnnnnnnnnnnnnnnnnnnnnnnnnnnnnnnnnnnnnnnnnnnnnnnnnnnnnnnnnnnnnnnnnnnnnnnnnnnnnnnnnnnnnnnnnnnnnnnnnnnnnnnnnnnnnnnnnnnnnnnnnnnnnnnnnnnnnnnnnnnnnnnnnnnnnnnnnnnnnnnnnnnnnnnnnnnnnnnnnnnnnnnnnnnnnnnnnnnnnnnnnnnnnnnnnnnnnnnnnnnnnnnnnnnnnnnnnnnnnnnnnnnnnnnnnnnnnnnnnnnnnnnnnnnnnnnnnnnnnnnnnnnnnnnnnnnnnnnnnnnnnnnnnnnnnnnnnnnnnnnnnnnnnnnnnnnnnnnnnnnnnnnnnnnnnnnnnnnnnnnnnnnnnnnnnnnnnnnnnnnnnnnnnnnnnnnnnnnnnnnnnnnnnnnnnnnnnnnnnnnnnnnnnnnnnnnnnnnnnnnnnnnnnnnnnnnnnnnnnnnnnnnnnnnnnnnnnnnnnnnnnnnnnnnnnnnnnnnnnnnnnnnnnnnnnnnnnnnnnnnnnnnnnnnnnnnnnnnnnnnnnnnnnnnnnnnnnnnnnnnnnnnnnnnnnnnnnnnnnnnnnnnnnnnnnnnnnnnnnnnnnnnnnnnnnnnnnnnnnnnnnnnnnnnnnnnnnnnnnnnnnnnnnnnnnnnnnnnnnnnnnnnnnnnnnnnnnnnnnnnnnnnnnnnnnnnnnnnnnnnnnnnnnnnnnnnnnnnnnnnnnnnnnnnnnnnnnnnnnnnnnnnnnnnnnnnnnnnnnnnnnnnnnnnnnnnnnnnnnnnnnnnnnnnnnnnnnnnnnnnnnnnnnnnnnnnnnnnnnnnnnnnnnnnnnnnnnnnnnnnnnnnnnnnnnnnnnnnnnnnnnnnnnnnnnnnnnnnnnnnnnnnnnnnnnnnnnnnnnnnnnnnnnnnnnnnnnnnnnnnnnnnnnnnnnnnnnnnnnnnnnnnnnnnnnnnnnnnnnnnnnnnnnnnnnnnnnnnnnnnnnnnnnnnnnnnnnnnnnnnnnnnnnnnnnnnnnnnnnnnnnnnnnnnnnnnnnnnnnnnnnnnnnnnnnnnnnnnnnnnnnnnnnnnnnnnnnnnnnnnnnnnnnnnnnnnnnnnnnnnnnnnnnnnnnnnnnnnnnnnnnnnnnnnnnnnnnnnnnnnnnnnnnnnnnnnnnnnnnnnnnnnnnnnnnnnnnnnnnnnnnnnnnnnnnnnnnnnnnnnnnnnnnnnnnnnnnnnnnnnnnnnnnnnnnnnnnnnnnnnnnnnnnnnnnnnnnnnnnnnnnnnnnnnnnnnnnnnnnnnnnnnnnnnnnnnnnnnnnnnnnnnnnnnnnnnnnnnnnnnnnnnnnnnnnnnnnnnnnnnnnnnnnnnnnnnnnnnnnnnnnnnnnnnnnnnnnnnnnnnnnnnnnnnnnnnnnnnnnnnnnnnnnnnnnnnnnnnnnnnnnnnnnnnnnnnnnnnnnnnnnnnnnnnnnnnnnnnnnnnnnnnnnnnnnnnnnnnnnnnnnnnnnnnnnnnnnnnnnnnnnnnnnnnnnnnnnnnnnnnnnnnnnnnnnnnnnnnnnnnnnnnnnnnnnnnnnnnnnnnnnnnnnnnnnnnnnnnnnnnnnnnnnnnnnnnnnnnnnnnnnnnnnnnnnnnnnnnnnnnnnnnnnnnnnnnnnnnnnnnnnnnnnnnnnnnnnnnnnnnnnnnnnnnnnnnnnnnnnnnnnnnnnnnnnnnnnnnnnnnnnnnnnnnnnnnnnnnnnnnnnnnnnnnnnnnnnnnnnnnnnnnnnnnnnnnnnnnnnnnnnnnnnnnnnnnnnnnnnnnnnnnnnnnnnnnnnnnnnnnnnnnnnnnnnnnnnnnnnnnnnnnnnnnnnnnnnnnnnnnnnnnnnnnnnnnnnnnnnnnnnnnnnnnnnnnnnnnnnnnnnnnnnnnnnnnnnnnnnnnnnnnnnnnnnnnnnnnnnnnnnnnnnnnnnnnnnnnnnnnnnnnnnnnnnnnnnnnnnnnnnnnnnnnnnnnnnnnnnnnnnnnnnnnnnnnnnnnnnnnnnnnnnnnnnnnnnnnnnnnnnnnnnnnnnnnnnnnnnnnnnnnnnnnnnnnnnnnnnnnnnnnnnnnnnnnnnnnnnnnnnnnnnnnnnnnnnnnnnnnnnnnnnnnnnnnnnnnnnnnnnnnnnnnnnnnnnnnnnnnnnnnnnnnnnnnnnnnnnnnnnnnnnnnnnnnnnnnnnnnnnnnnnnnnnnnnnnnnnnnnnnnnnnnnnnnnnnnnnnnnnnnnnnnnnnnnnnnnnnnnnnnnnnnnnnnnnnnnnnnnnnnnnnnnnnnnnnnnnnnnnnnnnnnnnnnnnnnnnnnnnnnnnnnnnnnnnnnnnnnnnnnnnnnnnnnnnnnnnnnnnnnnnnnnnnnnnnnnnnnnnnnnnnnnnnnnnnnnnnnnnnnnnnnnnnnnnnnnnnnnnnnnnnnnnnnnnnnnnnnnnnnnnnnnnnnnnnnnnnnnnnnnnnnnnnnnnnnnnnnnnnnnnnnnnnnnnnnnnnnnnnnnnnnnnnnnnnnnnnnnnnnnnnnnnnnnnnnnnnnnnnnnnnnnnnnnnnnnnnnnnnnnnnnnnnnnnnnnnnnnnnnnnnnnnnnnnnnnnnnnnnnnnnnnnnnnnnnnnnnnnnnnnnnnnnnnnnnnnnnnnnnnnnnnnnnnnnnnnnnnnnnnnnnnnnnnnnnnnnnnnnnnnnnnnnnnnnnnnnnnnnnnnnnnnnnnnnnnnnnnnnnnnnnnnnnnnnnnnnnnnnnnnnnnnnnnnnnnnnnnnnnnnnnnnnnnnnnnnnnnnnnnnnnnnnnnnnnnnnnnnnnnnnnnnnnnnnnnnnnnnnnnnnnnnnnnnnnnnnnnnnnnnnnnnnnnnnnnnnnnnnnnnnnnnnnnnnnnnnnnnnnnnnnnnnnnnnnnnnnnnnnnnnnnnnnnnnnnnnnnnnnnnnnnnnnnnnnnnnnnnnnnnnnnnnnnnnnnnnnnnnnnnnnnnnnnnnnnnnnnnnnnnnnnnnnnnnnnnnnnnnnnnnnnnnnnnnnnnnnnnnnnnnnnnnnnnnnnnnnnnnnnnnnnnnnnnnnnnnnnnnnnnnnnnnnnnnnnnnnnnnnnnnnnnnnnnnnnnnnnnnnnnnnnnnnnnnnnnnnnnnnnnnnnnnnnnnnnnnnnnnnnnnnnnnnnnnnnnnnnnnnnnnnnnnnnnnnnnnnnnnnnnnnnnnnnnnnnnnnnnnnnnnnnnnnnnnnnnnnnnnnnnnnnnnnnnnnnnnnnnnnnnnnnnnnnnnnnnnnnnnnnnnnnnnnnnnnnnnnnnnnnnnnnnnnnnnnnnnnnnnnnnnnnnnnnnnnnnnnnnnnnnnnnnnnnnnnnnnnnnnnnnnnnnnnnnnnnnnnnnnnnnnnnnnnnnnnnnnnnnnnnnnnnnnnnnnnnnnnnnnnnnnnnnnnnnnnnnnnnnnnnnnnnnnnnnnnnnnnnnnnnnnnnnnnnnnnnnnnnnnnnnnnnnnnnnnnnnnnnnnnnnnnnnnnnnnnnnnnnnnnnnnnnnnnnnnnnnnnnnnnnnnnnnnnnnnnnnnnnnnnnnnnnnnnnnnnnnnnnnnnnnnnnnnnnnnnnnnnnnnnnnnnnnnnnnnnnnnnnnnnnnnnnnnnnnnnnnnnnnnnnnnnnnnnnnnnnnnnnnnnnnnnnnnnnnnnnnnnnnnnnnnnnnnnnnnnnnnnnnnnnnnnnnnnnnnnnnnnnnnnnnnnnnnnnnnnnnnnnnnnnnnnnnnnnnnnnnnnnnnnnnnnnnnnnnnnnnnnnnnnnnnnnnnnnnnnnnnnnnnnnnnnnnnnnnnnnnnnnnnnnnnnnnnnnnnnnnnnnnnnnnnnnnnnnnnnnnnnnnnnnnnnnnnnnnnnnnnnnnnnnnnnnnnnnnnnnnnnnnnnnnnnnnnnnnnnnnnnnnnnnnnnnnnnnnnnnnnnnnnnnnnnnnnnnnnnnnnnnnnnnnnnnnnnnnnnnnnnnnnnnnnnnnnnnnnnnnnnnnnnnnnnnnnnnnnnnnnnnnnnnnnnnnnnnnnnnnnnnnnnnnnnnnnnnnnnnnnnnnnnnnnnnnnnnnnnnnnnnnnnnnnnnnnnnnnnnnnnnnnnnnnnnnnnnnnnnnnnnnnnnnnnnnnnnnnnnnnnnnnnnnnnnnnnnnnnnnnnnnnnnnnnnnnnnnnnnnnnnnnnnnnnnnnnnnnnnnnnnnnnnnnnnnnnnnnnnnnnnnnnnnnnnnnnnnnnnnnnnnnnnnnnnnnnnnnnnnnnnnnnnnnnnnnnnnnnnnnnnnnnnnnnnnnnnnnnnnnnnnnnnnnnnnnnnnnnnnnnnnnnnnnnnnnnnnnnnnnnnnnnnnnnnnnnnnnnnnnnnnnnnnnnnnnnnnnnnnnnnnnnnnnnnnnnnnnnnnnnnnnnnnnnnnnnnnnnnnnnnnnnnnnnnnnnnnnnnnnnnnnnnnnnnnnnnnnnnnnnnnnnnnnnnnnnnnnnnnnnnnnnnnnnnnnnnnnnnnnnnnnnnnnnnnnnnnnnnnnnnnnnnnnnnnnnnnnnnnnnnnnnnnnnnnnnnnnnnnnnnnnnnnnnnnnnnnnnnnnnnnnnnnnnnnnnnnnnnnnnnnnnnnnnnnnnnnnnnnnnnnnnnnnnnnnnnnnnnnnnnnnnnnnnnnnnnnnnnnnnnnnnnnnnnnnnnnnnnnnnnnnnnnnnnnnnnnnnnnnnnnnnnnnnnnnnnnnnnnnnnnnnnnnnnnnnnnnnnnnnnnnnnnnnnnnnnnnnnnnnnnnnnnnnnnnnnnnnnnnnnnnnnnnnnnnnnnnnnnnnnnnnnnnnnnnnnnnnnnnnnnnnnnnnnnnnnnnnnnnnnnnnnnnnnnnnnnnnnnnnnnnnnnnnnnnnnnnnnnnnnnnnnnnnnnnnnnnnnnnnnnnnnnnnnnnnnnnnnnnnnnnnnnnnnnnnnnnnnnnnnnnnnnnnnnnnnnnnnnnnnnnnnnnnnnnnnnnnnnnnnnnnnnnnnnnnnnnnnnnnnnnnnnnnnnnnnnnnnnnnnnnnnnnnnnnnnnnnnnnnnnnnnnnnnnnnnnnnnnnnnnnnnnnnnnnnnnnnnnnnnnnnnnnnnnnnnnnnnnnnnnnnnnnnnnnnnnnnnnnnnnnnnnnnnnnnnnnnnnnnnnnnnnnnnnnnnnnnnnnnnnnnnnnnnnnnnnnnnnnnnnnnnnnnnnnnnnnnnnnnnnnnnnnnnnnnnnnnnnnnnnnnnnnnnnnnnnnnnnnnnnnnnnnnnnnnnnnnnnnnnnnnnnnnnnnnnnnnnnnnnnnnnnnnnnnnnnnnnnnnnnnnnnnnnnnnnnnnnnnnnnnnnnnnnnnnnnnnnnnnnnnnnnnnnnnnnnnnnnnnnnnnnnnnnnnnnnnnnnnnnnnnnnnnnnnnnnnnnnnnnnnnnnnnnnnnnnnnnnnnnnnnnnnnnnnnnnnnnnnnnnnnnnnnnnnnnnnnnnnnnnnnnnnnnnnnnnnnnnnnnnnnnnnnnnnnnnnnnnnnnnnnnnnnnnnnnnnnnnnnnnnnnnnnnnnnnnnnnnnnnnnnnnnnnnnnnnnnnnnnnnnnnnnnnnnnnnnnnnnnnnnnnnnnnnnnnnnnnnnnnnnnnnnnnnnnnnnnnnnnnnnnnnnnnnnnnnnnnnnnnnnnnnnnnnnnnnnnnnnnnnnnnnnnnnnnnnnnnnnnnnnnnnnnnnnnnnnnnnnnnnnnnnnnnnnnnnnnnnnnnnnnnnnnnnnnnnnnnnnnnnnnnnnnnnnnnnnnnnnnnnnnnnnnnnnnnnnnnnnnnnnnnnnnnnnnnnnnnnnnnnnnnnnnnnnnnnnnnnnnnnnnnnnnnnnnnnnnnnnnnnnnnnnnnnnnnnnnnnnnnnnnnnnnnnnnnnnnnnnnnnnnnnnnnnnnnnnnnnnnnnnnnnnnnnnnnnnnnnnnnnnnnnnnnnnnnnnnnnnnnnnnnnnnnnnnnnnnnnnnnnnnnnnnnnnnnnnnnnnnnnnnnnnnnnnnnnnnnnnnnnnnnnnnnnnnnnnnnnnnnnnnnnnnnnnnnnnnnnnnnnnnnnnnnnnnnnnnnnnnnnnnnnnnnnnnnnnnnnnnnnnnnnnnnnnnnnnnnnnnnnnnnnnnnnnnnnnnnnnnnnnnnnnnnnnnnnnnnnnnnnnnnnnnnnnnnnnnnnnnnnnnnnnnnnnnnnnnnnnnnnnnnnnnnnnnnnnnnnnnnnnnnnnnnnnnnnnnnnnnnnnnnnnnnnnnnnnnnnnnnnnnnnnnnnnnnnnnnnnnnnnnnnnnnnnnnnnnnnnnnnnnnnnnnnnnnnnnnnnnnnnnnnnnnnnnnnnnnnnnnnnnnnnnnnnnnnnnnnnnnnnnnnnnnnnnnnnnnnnnnnnnnnnnnnnnnnnnnnnnnnnnnnnnnnnnnnnnnnnnnnnnnnnnnnnnnnnnnnnnnnnnnnnnnnnnnnnnnnnnnnnnnnnnnnnnnnnnnnnnnnnnnnnnnnnnnnnnnnnnnnnnnnnnnnnnnnnnnnnnnnnnnnnnnnnnnnnnnnnnnnnnnnnnnnnnnnnnnnnnnnnnnnnnnnnnnnnnnnnnnnnnnnnnnnnnnnnnnnnnnnnnnnnnnnnnnnnnnnnnnnnnnnnnnnnnnnnnnnnnnnnnnnnnnnnnnnnnnnnnnnnnnnnnnnnnnnnnnnnnnnnnnnnnnnnnnnnnnnnnnnnnnnnnnnnnnnnnnnnnnnnnnnnnnnnnnnnnnnnnnnnnnnnnnnnnnnnnnnnnnnnnnnnnnnnnnnnnnnnnnnnnnnnnnnnnnnnnnnnnnnnnnnnnnnnnnnnnnnnnnnnnnnnnnnnnnnnnnnnnnnnnnnnnnnnnnnnnnnnnnnnnnnnnnnnnnnnnnnnnnnnnnnnnnnnnnnnnnnnnnnnnnnnnnnnnnnnnnnnnnnnnnnnnnnnnnnnnnnnnnnnnnnnnnnnnnnnnnnnnnnnnnnnnnnnnnnnnnnnnnnnnnnnnnnnnnnnnnnnnnnnnnnnnnnnnnnnnnnnnnnnnnnnnnnnnnnnnnnnnnnnnnnnnnnnnnnnnnnnnnnnnnnnnnnnnnnnnnnnnnnnnnnnnnnnnnnnnnnnnnnnnnnnnnnnnnnnnnnnnnnnnnnnnnnnnnnnnnnnnnnnnnnnnnnnnnnnnnnnnnnnnnnnnnnnnnnnnnnnnnnnnnnnnnnnnnnnnnnnnnnnnnnnnnnnnnnnnnnnnnnnnnnnnnnnnnnnnnnnnnnnnnnnnnnnnnnnnnnnnnnnnnnnnnnnnnnnnnnnnnnnnnnnnnnnnnnnnnnnnnnnnnnnnnnnnnnnnnnnnnnnnnnnnnnnnnnnnnnnnnnnnnnnnnnnnnnnnnnnnnnnnnnnnnnnnnnnnnnnnnnnnnnnnnnnnnnnnnnnnnnnnnnnnnnnnnnnnnnnnnnnnnnnnnnnnnnnnnnnnnnnnnnnnnnnnnnnnnnnnnnnnnnnnnnnnnnnnnnnnnnnnnnnnnnnnnnnnnnnnnnnnnnnnnnnnnnnnnnnnnnnnnnnnnnnnnnnnnnnnnnnnnnnnnnnnnnnnnnnnnnnnnnnnnnnnnnnnnnnnnnnnnnnnnnnnnnnnnnnnnnnnnnnnnnnnnnnnnnnnnnnnnnnnnnnnnnnnnnnnnnnnnnnnnnnnnnnnnnnnnnnnnnnnnnnnnnnnnnnnnnnnnnnnnnnnnnnnnnnnnnnnnnnnnnnnnnnnnnnnnnnnnnnnnnnnnnnnnnnnnnnnnnnnnnnnnnnnnnnnnnnnnnnnnnnnnnnnnnnnnnnnnnnnnnnnnnnnnnnnnnnnnnnnnnnnnnnnnnnnnnnnnnnnnnnnnnnnnnnnnnnnnnnnnnnnnnnnnnnnnnnnnnnnnnnnnnnnnnnnnnnnnnnnnnnnnnnnnnnnnnnnnnnnnnnnnnnnnnnnnnnnnnnnnnnnnnnnnnnnnnnnnnnnnnnnnnnnnnnnnnnnnnnnnnnnnnnnnnnnnnnnnnnnnnnnnnnnnnnnnnnnnnnnnnnnnnnnnnnnnnnnnnnnnnnnnnnnnnnnnnnnnnnnnnnnnnnnnnnnnnnnnnnnnnnnnnnnnnnnnnnnnnnnnnnnnnnnnnnnnnnnnnnnnnnnnnnnnnnnnnnnnnnnnnnnnnnnnnnnnnnnnnnnnnnnnnnnnnnnnnnnnnnnnnnnnnnnnnnnnnnnnnnnnnnnnnnnnnnnnnnnnnnnnnnnnnnnnnnnnnnnnnnnnnnnnnnnnnnnnnnnnnnnnnnnnnnnnnnnnnnnnnnnnnnnnnnnnnnnnnnnnnnnnnnnnnnnnnnnnnnnnnnnnnnnnnnnnnnnnnnnnnnnnnnnnnnnnnnnnnnnnnnnnnnnnnnnnnnnnnnnnnnnnnnnnnnnnnnnnnnnnnnnnnnnnnnnnnnnnnnnnnnnnnnnnnnnnnnnnnnnnnnnnnnnnnnnnnnnnnnnnnnnnnnnnnnnnnnnnnnnnnnnnnnnnnnnnnnnnnnnnnnnnnnnnnnnnnnnnnnnnnnnnnnnnnnnnnnnnnnnnnnnnnnnnnnnnnnnnnnnnnnnnnnnnnnnnnnnnnnnnnnnnnnnnnnnnnnnnnnnnnnnnnnnnnnnnnnnnnnnnnnnnnnnnnnnnnnnnnnnnnnnnnnnnnnnnnnnnnnnnnnnnnnnnnnnnnnnnnnnnnnnnnnnnnnnnnnnnnnnnnnnnnnnnnnnnnnnnnnnnnnnnnnnnnnnnnnnnnnnnnnnnnnnnnnnnnnnnnnnnnnnnnnnnnnnnnnnnnnnnnnnnnnnnnnnnnnnnnnnnnnnnnnnnnnnnnnnnnnnnnnnnnnnnnnnnnnnnnnnnnnnnnnnnnnnnnnnnnnnnnnnnnnnnnnnnnnnnnnnnnnnnnnnnnnnnnnnnnnnnnnnnnnnnnnnnnnnnnnnnnnnnnnnnnnnnnnnnnnnnnnnnnnnnnnnnnnnnnnnnnnnnnnnnnnnnnnnnnnnnnnnnnnnnnnnnnnnnnnnnnnnnnnnnnnnnnnnnnnnnnnnnnnnnnnnnnnnnnnnnnnnnnnnnnnnnnnnnnnnnnnnnnnnnnnnnnnnnnnnnnnnnnnnnnnnnnnnnnnnnnnnnnnnnnnnnnnnnnnnnnnnnnnnnnnnnnnnnnnnnnnnnnnnnnnnnnnnnnnnnnnnnnnnnnnnnnnnnnnnnnnnnnnnnnnnnnnnnnnnnnnnnnnnnnnnnnnnnnnnnnnnnnnnnnnnnnnnnnnnnnnnnnnnnnnnnnnnnnnnnnnnnnnnnnnnnnnnnnnnnnnnnnnnnnnnnnnnnnnnnnnnnnnnnnnnnnnnnnnnnnnnnnnnnnnnnnnnnnnnnnnnnnnnnnnnnnnnnnnnnnnnnnnnnnnnnnnnnnnnnnnnnnnnnnnnnnnnnnnnnnnnnnnnnnnnnnnnnnnnnnnnnnnnnnnnnnnnnnnnnnnnnnnnnnnnnnnnnnnnnnnnnnnnnnnnnnnnnnnnnnnnnnnnnnnnnnnnnnnnnnnnnnnnnnnnnnnnnnnnnnnnnnnnnnnnnnnnnnnnnnnnnnnnnnnnnnnnnnnnnnnnnnnnnnnnnnnnnnnnnnnnnnnnnnnnnnnnnnnnnnnnnnnnnnnnnnnnnnnnnnnnnnnnnnnnnnnnnnnnnnnnnnnnnnnnnnnnnnnnnnnnnnnnnnnnnnnnnnnnnnnnnnnnnnnnnnnnnnnnnnnnnnnnnnnnnnnnnnnnnnnnnnnnnnnnnnnnnnnnnnnnnnnnnnnnnnnnnnnnnnnnnnnnnnnnnnnnnnnnnnnnnnnnnnnnnnnnnnnnnnnnnnnnnnnnnnnnnnnnnnnnnnnnnnnnnnnnnnnnnnnnnnnnnnnnnnnnnnnnnnnnnnnnnnnnnnnnnnnnnnnnnnnnnnnnnnnnnnnnnnnnnnnnnnnnnnnnnnnnnnnnnnnnnnnnnnnnnnnnnnnnnnnnnnnnnnnnnnnnnnnnnnnnnnnnnnnnnnnnnnnnnnnnnnnnnnnnnnnnnnnnnnnnnnnnnnnnnnnnnnnnnnnnnnnnnnnnnnnnnnnnnnnnnnnnnnnnnnnnnnnnnnnnnnnnnnnnnnnnnnnnnnnnnnnnnnnnnnnnnnnnnnnnnnnnnnnnnnnnnnnnnnnnnnnnnnnnnnnnnnnnnnnnnnnnnnnnnnnnnnnnnnnnnnnnnnnnnnnnnnnnnnnnnnnnnnnnnnnnnnnnnnnnnnnnnnnnnnnnnnnnnnnnnnnnnnnnnnnnnnnnnnnnnnnnnnnnnnnnnnnnnnnnnnnnnnnnnnnnnnnnnnnnnnnnnnnnnnnnnnnnnnnnnnnnnnnnnnnnnnnnnnnnnnnnnnnnnnnnnnnnnnnnnnnnnnnnnnnnnnnnnnnnnnnnnnnnnnnnnnnnnnnnnnnnnnnnnnnnnnnnnnnnnnnnnnnnnnnnnnnnnnnnnnnnnnnnnnnnnnnnnnnnnnnnnnnnnnnnnnnnnnnnnnnnnnnnnnnnnnnnnnnnnnnnnnnnnnnnnnnnnnnnnnnnnnnnnnnnnnnnnnnnnnnnnnnnnnnnnnnnnnnnnnnnnnnnnnnnnnnnnnnnnnnnnnnnnnnnnnnnnnnnnnnnnnnnnnnnnnnnnnnnnnnnnnnnnnnnnnnnnnnnnnnnnnnnnnnnnnnnnnnnnnnnnnnnnnnnnnnnnnnnnnnnnnnnnnnnnnnnnnnnnnnnnnnnnnnnnnnnnnnnnnnnnnnnnnnnnnnnnnnnnnnnnnnnnnnnnnnnnnnnnnnnnnnnnnnnnnnnnnnnnnnnnnnnnnnnnnnnnnnnnnnnnnnnnnnnnnnnnnnnnnnnnnnnnnnnnnnnnnnnnnnnnnnnnnnnnnnnnnnnnnnnnnnnnnnnnnnnnnnnnnnnnnnnnnnnnnnnnnnnnnnnnnnnnnnnnnnnnnnnnnnnnnnnnnnnnnnnnnnnnnnnnnnnnnnnnnnnnnnnnnnnnnnnnnnnnnnnnnnnnnnnnnnnnnnnnnnnnnnnnnnnnnnnnnnnnnnnnnnnnnnnnnnnnnnnnnnnnnnnnnnnnnnnnnnnnnnnnnnnnnnnnnnnnnnnnnnnnnnnnnnnnnnnnnnnnnnnnnnnnnnnnnnnnnnnnnnnnnnnnnnnnnnnnnnnnnnnnnnnnnnnnnnnnnnnnnnnnnnnnnnnnnnnnnnnnnnnnnnnnnnnnnnnnnnnnnnnnnnnnnnnnnnnnnnnnnnnnnnnnnnnnnnnnnnnnnnnnnnnnnnnnnnnnnnnnnnnnnnnnnnnnnnnnnnnnnnnnnnnnnnnnnnnnnnnnnnnnnnnnnnnnnnnnnnnnnnnnnnnnnnnnnnnnnnnnnnnnnnnnnnnnnnnnnnnnnnnnnnnnnnnnnnnnnnnnnnnnnnnnnnnnnnnnnnnnnnnnnnnnnnnnnnnnnnnnnnnnnnnnnnnnnnnnnnnnnnnnnnnnnnnnnnnnnnnnnnnnnnnnnnnnnnnnnnnnnnnnnnnnnnnnnnnnnnnnnnnnnnnnnnnnnnnnnnnnnnnnnnnnnnnnnnnnnnnnnnnnnnnnnnnnnnnnnnnnnnnnnnnnnnnnnnnnnnnnnnnnnnnnnnnnnnnnnnnnnnnnnnnnnnnnnnnnnnnnnnnnnnnnnnnnnnnnnnnnnnnnnnnnnnnnnnnnnnnnnnnnnnnnnnnnnnnnnnnnnnnnnnnnnnnnnnnnnnnnnnnnnnnnnnnnnnnnnnnnnnnnnnnnnnnnnnnnnnnnnnnnnnnnnnnnnnnnnnnnnnnnnnnnnnnnnnnnnnnnnnnnnnnnnnnnnnnnnnnnnnnnnnnnnnnnnnnnnnnnnnnnnnnnnnnnnnnnnnnnnnnnnnnnnnnnnnnnnnnnnnnnnnnnnnnnnnnnnnnnnnnnnnnnnnnnnnnnnnnnnnnnnnnnnnnnnnnnnnnnnnnnnnnnnnnnnnnnnnnnnnnnnnnnnnnnnnnnnnnnnnnnnnnnnnnnnnnnnnnnnnnnnnnnnnnnnnnnnnnnnnnnnnnnnnnnnnnnnnnnnnnnnnnnnnnnnnnnnnnnnnnnnnnnnnnnnnnnnnnnnnnnnnnnnnnnnnnnnnnnnnnnnnnnnnnnnnnnnnnnnnnnnnnnnnnnnnnnnnnnnnnnnnnnnnnnnnnnnnnnnnnnnnnnnnnnnnnnnnnnnnnnnnnnnnnnnnnnnnnnnnnnnnnnnnnnnnnnnnnnnnnnnnnnnnnnnnnnnnnnnnnnnnnnnnnnnnnnnnnnnnnnnnnnnnnnnnnnnnnnnnnnnnnnnnnnnnnnnnnnnnnnnnnnnnnnnnnnnnnnnnnnnnnnnnnnnnnnnnnnnnnnnnnnnnnnnnnnnnnnnnnnnnnnnnnnnnnnnnnnnnnnnnnnnnnnnnnnnnnnnnnnnnnnnnnnnnnnnnnnnnnnnnnnnnnnnnnnnnnnnnnnnnnnnnnnnnnnnnnnnnnnnnnnnnnnnnnnnnnnnnnnnnnnnnnnnnnnnnnnnnnnnnnnnnnnnnnnnnnnnnnnnnnnnnnnnnnnnnnnnnnnnnnnnnnnnnnnnnnnnnnnnnnnnnnnnnnnnnnnnnnnnnnnnnnnnnnnnnnnnnnnnnnnnnnnnnnnnnnnnnnnnnnnnnnnnnnnnnnnnnnnnnnnnnnnnnnnnnnnnnnnnnnnnnnnnnnnnnnnnnnnnnnnnnnnnnnnnnnnnnnnnnnnnnnnnnnnnnnnnnnnnnnnnnnnnnnnnnnnnnnnnnnnnnnnnnnnnnnnnnnnnnnnnnnnnnnnnnnnnnnnnnnnnnnnnnnnnnnnnnnnnnnnnnnnnnnnnnnnnnnnnnnnnnnnnnnnnnnnnnnnnnnnnnnnnnnnnnnnnnnnnnnnnnnnnnnnnnnnnnnnnnnnnnnnnnnnnnnnnnnnnnnnnnnnnnnnnnnnnnnnnnnnnnnnnnnnnnnnnnnnnnnnnnnnnnnnnnnnnnnnnnnnnnnnnnnnnnnnnnnnnnnnnnnnnnnnnnnnnnnnnnnnnnnnnnnnnnnnnnnnnnnnnnnnnnnnnnnnnnnnnnnnnnnnnnnnnnnnnnnnnnnnnnnnnnnnnnnnnnnnnnnnnnnnnnnnnnnnnnnnnnnnnnnnnnnnnnnnnnnnnnnnnnnnnnnnnnnnnnnnnnnnnnnnnnnnnnnnnnnnnnnnnnnnnnnnnnnnnnnnnnnnnnnnnnnnnnnnnnnnnnnnnnnnnnnnnnnnnnnnnnnnnnnnnnnnnnnnnnnnnnnnnnnnnnnnnnnnnnnnnnnnnnnnnnnnnnnnnnnnnnnnnnnnnnnnnnnnnnnnnnnnnnnnnnnnnnnnnnnnnnnnnnnnnnnnnnnnnnnnnnnnnnnnnnnnnnnnnnnnnnnnnnnnnnnnnnnnnnnnnnnnnnnnnnnnnnnnnnnnnnnnnnnnnnnnnnnnnnnnnnnnnnnnnnnnnnnnnnnnnnnnnnnnnnnnnnnnnnnnnnnnnnnnnnnnnnnnnnnnnnnnnnnnnnnnnnnnnnnnnnnnnnnnnnnnnnnnnnnnnnnnnnnnnnnnnnnnnnnnnnnnnnnnnnnnnnnnnnnnnnnnnnnnnnnnnnnnnnnnnnnnnnnnnnnnnnnnnnnnnnnnnnnnnnnnnnnnnnnnnnnnnnnnnnnnnnnnnnnnnnnnnnnnnnnnnnnnnnnnnnnnnnnnnnnnnnnnnnnnnnnnnnnnnnnnnnnnnnnnnnnnnnnnnnnnnnnnnnnnnnnnnnnnnnnnnnnnnnnnnnnnnnnnnnnnnnnnnnnnnnnnnnnnnnnnnnnnnnnnnnnnnnnnnnnnnnnnnnnnnnnnnnnnnnnnnnnnnnnnnnnnnnnnnnnnnnnnnnnnnnnnnnnnnnnnnnnnnnnnnnnnnnnnnnnnnnnnnnnnnnnnnnnnnnnnnnnnnnnnnnnnnnnnnnnnnnnnnnnnnnnnnnnnnnnnnnnnnnnnnnnnnnnnnnnnnnnnnnnnnnnnnnnnnnnnnnnnnnnnnnnnnnnnnnnnnnnnnnnnnnnnnnnnnnnnnnnnnnnnnnnnnnnnnnnnnnnnnnnnnnnnnnnnnnnnnnnnnnnnnnnnnnnnnnnnnnnnnnnnnnnnnnnnnnnnnnnnnnnnnnnnnnnnnnnnnnnnnnnnnnnnnnnnnnnnnnnnnnnnnnnnnnnnnnnnnnnnnnnnnnnnnnnnnnnnnnnnnnnnnnnnnnnnnnnnnnnnnnnnnnnnnnnnnnnnnnnnnnnnnnnnnnnnnnnnnnnnnnnnnnnnnnnnnnnnnnnnnnnnnnnnnnnnnnnnnnnnnnnnnnnnnnnnnnnnnnnnnnnnnnnnnnnnnnnnnnnnnnnnnnnnnnnnnnnnnnnnnnnnnnnnnnnnnnnnnnnnnnnnnnnnnnnnnnnnnnnnnnnnnnnnnnnnnnnnnnnnnnnnnnnnnnnnnnnnnnnnnnnnnnnnnnnnnnnnnnnnnnnnnnnnnnnnnnnnnnnnnnnnnnnnnnnnnnnnnnnnnnnnnnnnnnnnnnnnnnnnnnnnnnnnnnnnnnnnnnnnnnnnnnnnnnnnnnnnnnnnnnnnnnnnnnnnnnnnnnnnnnnnnnnnnnnnnnnnnnnnnnnnnnnnnnnnnnnnnnnnnnnnnnnnnnnnnnnnnnnnnnnnnnnnnnnnnnnnnnnnnnnnnnnnnnnnnnnnnnnnnnnnnnnnnnnnnnnnnnnnnnnnnnnnnnnnnnnnnnnnnnnnnnnnnnnnnnnnnnnnnnnnnnnnnnnnnnnnnnnnnnnnnnnnnnnnnnnnnnnnnnnnnnnnnnnnnnnnnnnnnnnnnnnnnnnnnnnnnnnnnnnnnnnnnnnnnnnnnnnnnnnnnnnnnnnnnnnnnnnnnnnnnnnnnnnnnnnnnnnnnnnnnnnnnnnnnnnnnnnnnnnnnnnnnnnnnnnnnnnnnnnnnnnnnnnnnnnnnnnnnnnnnnnnnnnnnnnnnnnnnnnnnnnnnnnnnnnnnnnnnnnnnnnnnnnnnnnnnnnnnnnnnnnnnnnnnnnnnnnnnnnnnnnnnnnnnnnnnnnnnnnnnnnnnnnnnnnnnnnnnnnnnnnnnnnnnnnnnnnnnnnnnnnnnnnnnnnnnnnnnnnnnnnnnnnnnnnnnnnnnnnnnnnnnnnnnnnnnnnnnnnnnnnnnnnnnnnnnnnnnnnnnnnnnnnnnnnnnnnnnnnnnnnnnnnnnnnnnnnnnnnnnnnnnnnnnnnnnnnnnnnnnnnnnnnnnnnnnnnnnnnnnnnnnnnnnnnnnnnnnnnnnnnnnnnnnnnnnnnnnnnnnnnnnnnnnnnnnnnnnnnnnnnnnnnnnnnnnnnnnnnnnnnnnnnnnnnnnnnnnnnnnnnnnnnnnnnnnnnnnnnnnnnnnnnnnnnnnnnnnnnnnnnnnnnnnnnnnnnnnnnnnnnnnnnnnnnnnnnnnnnnnnnnnnnnnnnnnnnnnnnnnnnnnnnnnnnnnnnnnnnnnnnnnnnnnnnnnnnnnnnnnnnnnnnnnnnnnnnnnnnnnnnnnnnnnnnnnnnnnnnnnnnnnnnnnnnnnnnnnnnnnnnnnnnnnnnnnnnnnnnnnnnnnnnnnnnnnnnnnnnnnnnnnnnnnnnnnnnnnnnnnnnnnnnnnnnnnnnnnnnnnnnnnnnnnnnnnnnnnnnnnnnnnnnnnnnnnnnnnnnnnnnnnnnnnnnnnnnnnnnnnnnnnnnnnnnnnnnnnnnnnnnnnnnnnnnnnnnnnnnnnnnnnnnnnnnnnnnnnnnnnnnnnngaaatcatccgttgagaaatggtcgcttacgaagcggacgggcgtgtgggaacgatggttgtagcgcaatctatggcgggcgtgtacaagtatccattgtgctgtcgagtcgcgtgtgatgagcagacgtggtggctgggtgcgtggcgtcacaggaaggcgcgggaaggccacaacgaggcgagatggactcgggttgaatcacataaaatgggtccgacagctgtgagatttgaactcacgcgggttaccccaatagatttctagtctatcgccttaaccactcggccaagctgtcgttaaaattcgacacaaatccaaaccctcaccacattcaccgcaaacacacgtacgccaacgcacatccatgctaaccgcaccacaacctcctgcctaccattgcctacccttaccgtcgctgtcagcgcctacctacacacgcaacaaccaccactcacctctctcaccgaccgcgatactcgtatcgcgatgtctccggggctgcacgtggctcgttcgctatagaagctactagcggcttggacacggatgtgctgcgcactgagctatggttacagcatgcgctgctggcccaggggccacgaacgagcggttgtaaagaaaaaggcaataagatatcggaggaggggatcgaaccctcgatcttgagcgtgttaagctcacgtcctaaccactagacgacaccgacactcgaacgatcacacaaccctcaaaccgtgccattttaccacacaattatcacgccgcacgcacgcacaaaacgacctataccgccaacttccagcgtcgactggacaccatatcgcactcgcatcgcccacagaccaccacgcatgcttcaagacgatcgcaggacccaaaacatctcgcgacttgacccctccatctacggtactcagcagcgctcggttggatcctcctcgcaatcagccggtcgcggcggtagtgtacacgccacctacctatcgaggagccaaacgggtcatctctttctgcgcacgggttgcttcggcatcatggcatcatgtgcccaaaccacactgtgtcgccggccttttggcccagcccaacacctcgaggcacactgccacgatcgtgcctgctgtgccgtgccagcagcggtcagtcccattgcctgacctacctgcggacagcgcagttggtttcgagcctggcggggtttggaaatcatccgttgagaaatggtcgcttacgaagcggacgggcgtgtgggaacgatggttgtagcgcaatctatggcgggcgtgtacaagtatccattgtgctgtcgagtcgcgtgtgatgagcagacgtggtggctgggtgcgtggcgtcacaggaaggcgcgggaaggccacaacgaggcgagatggactcgggttgaatcacataaaatgggtccgacagctgtgagatttgaactcacgcgggttaccccaatagatttctagtctatcgccttaaccactcggccaagctgtcgttaaaatttgacacaaatccaaaccctcaccacattcaccgcaaacacacgtacgccaacgcacatccatgctaaccgcaccacaacctcctgcctaccattgcctacccttaccgtcgctgtcagcgcctacctacacacgcaacaaccaccactcacctctctcaccgaccgcgatactcgtatcgcgatgtctccggggctgcacgtggctcgttcgctatagaagctactagcggcttggacacggatgtgctgcgcactgagctatggttacagcatgcgctgctggtccaggggccacgaacgagcggttgtaaagaaaaaggcaataagatatcggaggaggggatcgaaccctcgatcttgagcgtgttaagctcacgtcctaaccactagacgacaccgacactcgaacgatcacacaaccctcaaaccgtcccattttatcacacaattatcacgccgcacgcacgcacaaaacgacctataccgccaacttccagcgtcgactggacaccatatcgcactcgcatcgcccacagatcaccacgcatgcttcaagacgatcgcaggacccaaaacatctcgcgacttgacccctccatctacggtactcagcagcgctcggttggatcctcctcgcaatcagccggtcgcggcggtagtgtacacgccacctacctatcgaggagccaaacgggtcatctctttctgcgcacgggttgcttcggcatcatggcatcatgtgcccaaaccacactgtgtcgccggccttttggcccagcccaacacctcgaggcacactgccacgatcgtgcctgctgtgccgtgccagcagcggtcagtcccattgcctgacctacctgcggacagcgcagttggtttcgagcctggcggggtttggaaatcatccgttgagaaatggtcgcttacgaagcggacgggcgtgtgggaacgatggttgtagcgcaatctatggcgggtgtgtacaagtatccattgtgctgtcgagtcgcgtgtgatgagcagacgtggtggctgggtgcgtggcgtcacaggaaggcgcgggaaggccacaacgaggcgagatggactcgggttgaatcacataaaatgggtccgacagctgtgagatttgaactcacgcgggttaccccaatagatttctagtctatcgccttaaccactcggccaagctgtcgttaaaattcgacacaaatccaaaccctcatcacattcaccgcaaacacacgtacgccaacgcacatccatgctaaccgcaccacaacctcctgcctaccattgcctacccttaccgtcgctgtcagcgcctacctacacacgcaacaaccaccactcacctctctcaccgaccgcgatactcgtatcgcgatgtctccggggctgcacgtggctcgttcgctatagaagctactagcggcttggacacggatgtgctgcgcactgagctatggttacagcatgcgctgctggcccaggggccacgaacgagcggttgtaaagaaaaaggcaataagatatcggaggaggggatcgaaccctcgatcttgagcgtgttaagctcacgtcctaaccactagacgacaccgacactcgaacgatcacacaaccctcaaaccgtcccattttatcacacaattatcacgccgcacgcacgcacaaaacgacctataccgccaacttccagcgtcgactggacaccatatcgcactcgcatcgcccacagaccaccacgcatgcttcaagacgatcgcaggacccaaaacatctcgcgacttgacccctccatctacggtactcagcagcgctcggttggatcctcctcgcaatcagccggtcgcggcggtagtgtacacgccacctacctatcgaggagccaaacgggtcatctctttctgcgcacgggttgcttcggcatcatggcatcatgtgcccaaaccacactgtgtcgccggccttttggcccagcccaacacctcgaggcacactgccacgatcgtgcctgctgtgccgtgccagcagcggtcagtcccattgcctgacctacctgcggacagcgcagttggtttcgagcctggcggggtttggaaatcatccgttgagaaatggtcgcttacgaagcggacgggcgtgtgggaacgatggttgtagcgcaatctatggcgggtgtgtacaagtatccattgtgctgtcgagtcgcgtgtgatgagcagacgtggtggctgggtgcgtggcgtcacaggaaggcgcgggaaggccacaacgaggcgagatggactcgggttgaatcacataaaatgggtccgacagctgtgagatttgaactcacgcgggttaccccaatagatttctagtctatcgccttaaccactcggccaagctgtcgttaaattttgacacaaatccaaaccctcaccacattcaccgcaaacacacgtacgccaacgcacatccatgctaaccgcaccacaacctcctgcctaccattgcctacccttaccgtcgctgtcagcgcctacctacacacgcaacaaccaccactcacctctctcaccgaccgcgatactcgtatcgcgatgtctccggggctgcacgtggctcgttcgctatagaagctactagcggcttggacacggatgtgctgcgcactgagctatggttacagcatgcgctgctggcccaggggccacgaacgagcggttgtaaagaaaaaggcaataagatatcggaggaggggatcgaaccctcgatcttgagcgtgttaagctcacgtcctaaccactagacgacaccgacactcgaacgatcacacaaccctcaaaccgtcccattttaccacacaattatcacgccgcacgcacgcacaaaacgacctataccgccaacttccagcgtcgactggacaccatatcgcactcgcatcgcccacagaccaccacgcatgcttcaagacgatcgcaggacccaaaacatctcgcgacttgacccctccatctacggtactcagcagcgctcggttggatcctcctcgcaatcagccggtcgcggcggtagtgtacacgccacctacctatcgaggagccaaacgggtcatctctttctgcgcacgggttgcttcggcatcatggcatcatgtgcccaaaccacactgtgtcgccggccttttggcccagcccaacacctcgaggcacactgccacgatcgtgcctgctgtgccgtgccagcagcggtcagtcccattgcctgacctacctgcggacagcgcagttggtttcgagcctggcggggtttggaaatcatccgttgagaaatggtcgcttacgaagcggacgggcgtgtgggaacgatggttgtagcgcaatctatggcgggcgtgtacaagtatccattgtgctgtcgagtcgcgtgtgatgagcagacgtggtggctgggtgcgtggcgtcacaggaaggcgcgggaaggccacaacgaggcgagatggactcgggttgaatcacataaaatgggtccgacagctgtgagatttgaactcacgcgggttaccccaatagatttctagtctatcgccttaaccactcggccaagctgtcgttaaaatttgacacaaatccaaaccctcagcacattcaccgcaaacacacgtacgccaacgcacatccatgctaaccgcaccacaacctcctgcctaccattgcctacccttaccgtcgctgtcagcgcctacctacacacgcaacaaccaccactcacctctctcaccgaccgcgatactcgtatcgcgatgtctccggggctgcacgtggctcgttcgctatagaagctactagcggcttggacacggatgtgctgcgcactgagctatggttacagcatgcgctgctggtccaggggccacgaacgagcggttgtaaagaaaaaggcaataagatatcggaggaggggatcgaaccctcgatcttgagcgtgttaagctcacgtcctaaccactagacgacaccgacactcgaacgatcacacaaccctcaaaccgtcccattttaccacacaattatcacgccgcacgcacgcacaaaacgacctataccgccaacttccagcgtcgactggacaccatatcgcactcgcatcgcccacagaccaccacgcatgcttcaagacgatcgcaggacccaaaacatctcgcgacttgacccctccatctacggtactcagcagcgctcggttggatcctcctcgcaatcagccggtcgcggcggtagtgtacacgccacctacctatcgaggagccaaacgggtcatctctttctgcgcacgggttgcttcggcatcatggcattatgtccttaagaaattgnnnnnnnnnnnnnnnnnnnnnnnnnnnnnnnnnnnnnnnnnnnnnnnnnnnnnnnnnnnnnnnnnnnnnnnnnnnnnnnnnnnnnnnnnnnnnnnnnnnnagcgcaatctatggcgggtgtgtacaagtatccattgtgctgtcgagtcgcgtgtgatgagcagacgtggtggctgggtgcgtggcgtcacaggaaggcgcgggaaggccacaacgaggcgagatggactcgggttgaatcacataaaatgggtccgacagctgtgagatttgaactcacgcgggttaccccaatagatttctagtctatcgccttaaccactcggccaagctgtcgttaaaatttgacacaaatccaaaccctcaccacattcaccgcaaacacacgtacgccaacgcacatccatgctaaccgcaccacaacctcctgcctaccattgcctacccttaccgtcgctgtcagcgcctacctacacacgcaacaaccaccactcacctctctcaccgaccgcgatactcgtatcgcgatgtctccggggctgcacgtggctcgttcgctatagaagctactagcggcttggacacggatgtgctgcgcactgagctatggttacagcatgcgctgctggtccaggggccacgaacgagcggttgtaaagaaaaaggcaataagatatcggaggaggggatcgaaccctcgatcttgagcgtgttaagctcacgtcctaaccactagacgacaccgacactcgaacgatcacacaaccctcaaaccgtcccattttatcacacaattatcacgcacaaaacgacctataccgccaacttccagcgtcgactggacaccatatcgcactcgcatcgcccacagaccaccacgcatgcttcaagacgatcgcaggacccaaaacatctcgcgacttgacccctccatctacggtactcagcagcgctcggttggatcctcctcgcaatcagccggtcgcggcggtagtgtacacgccacctacctatcgaggagccaaacgggtcatctctttctgcgcacgggttgcttcggcatcatggcatcatgtgcccaaaccacactgtgtcgccggccttttggcccagcccaacacctcgaggcacactgccacgatcgtgcctgctgtgccgtgccagcagcggtcagtcccattgcctgacctacctgcggacagcgcagttggtttcgagcctggcggggtttggaaatcatccgttgagaaatggtcgcttacgaagcggacgggcgtgtgggaacgatggttgtagcgcaatctatggcgggcgtgtacaagtatccattgtgctgtcgagtcgcgtgtgatgagcagagggtgcgtggcgtcacaggaaggcgcgggaaggccacaacgaggcgagatggactcgggttgaatcacataaaatgggtccgacagctgtgagatttgaactcacgcgggttaccccaatagatttctagtctatcgccttaaccactcggccaagctgtcgttaaaatttgacacaaatccaaaccctcaccacattcaccgcaaacacacgtacgccaacgcacatccatgctaaccgcaccacaacctcctgcctaccattgcctacccttaccgtcgctgtcagcgcctacctacacacgcaacaaccaccactcacctctctcaccgaccgcgatactcgtatcgcgatgtctccggggctgcacgtggctcgttcgctatagaagctactagcggcttggacacggatgtgctgcgcactgagctatggttacagcatgcgctgctggtccaggggccacgaacgagcggttgtaaagaaaaaggcaataagatatcggaggaggggatcgaaccctcgatcttgagcgtgttaagctcacgtcctaaccactagacgacaccgacactcgaacgatcacacaaccctcaaaccgtcccattttaccacacaattatcacgccgcacgcacgcacaaaacgacctataccgccaacttccagcgtcgactggacaccatatcgcactcgcatcgcccacagaccaccacgcatgcttcaagacgatcgcaggacccaaaacatctcgcgacttgacccctccatctacggtactcagcagcgctcggttggatcctcctcgcaatcagccggtcgcggcggtagtgtacacgccacctacctatcgaggagccaaacgggtcatctctttctgcgcacgggttgcttcggcatcatggcatcatgtgcccaaaccacactgtgtcgccggccttttggcccagcccaacacctcgaggcacactgccacgatcgtgcctgctgtgccgtgccagcagcggtcagtcccattgcctgacctacctgcggacagcgcagttggtttcgagcctggcggggtttggaaatcatccgttgagaaatggtcgcttacgaagcggacgggcgtgtgggaacgatggttgtagcgcaatctatggcgggcgtgtacaagtatccattgtgctgtcgagtcgcgtgtgatgagcagacgtggtggctgggtgcgtggcgtcacaggaaggcgcgggaaggccacaatgaggcgagatggactcgggttgaatcacataaaatgggtccgacagctgtgagatttgaactcacgcgggttaccccaatagatttctagtctatcgccttaaccactcggccaagctgtcgttaaaatttgacacaaatccaaaccctcaccacattcaccgcaaacacacgtacgccaacgcacatccatgctaaccgcaccacaacctcctgcctaccattgcctacccttaccgtcgctgtcagcgcctacctacacacgcaacaaccaccactcacctctctcaccgaccgcgatactcgtatcgcgatgtctccggggctgcacgtggctcgttcgctatagaagctactagcggcttggacacggatgtgctgcgcactgagctatggttacagcatgcgctgctggcccaggggccacgaacgagcggttgtaaagaaaaaggcaataagatatcggaggaggggatcgaaccctcgatcttgagcgtgttaagctcacgtcctaaccactagacgacaccgacactcgaacgatcacacaaccctcacaccgtgccattttatcacacaattatcacaccgcacgcacgcacaaaacgacctataccgccaacttccagcgtcgactggacaccatatcgcactcgcatcgcccacagaccaccacgcatgcttcaagacgatcgcaggacccaaaacatctcgcgacttgacccctccatctacggtactcagcagcgctcggttggatcctcctcgcaatcagccggtcgcggcggtagtgtacacgccacctacctatcgaggagccaaacgggtcatctctttctgcgcacgggttgcttcggcatcatggcatcatgtgcccaaaccacactgtgtcgccggccttttggcccagcccaacacctcgaggcacactgccacgatcgtgcctgctgtgccgtgccagcagcggtcagtcccattgcctgacctacctgcggacagcgcagttggtttcgagcctggcggggtttggaaatcatccgttgagaaatggtcgcttacgaagcggacgggcgtgtgggaacgatggttgtagcgcaatctatggcgggcgtgtacaagtatccattgtgctgtcgagtcgcgtgtgatgagcagacgtggtggctgggtgcgtggcgtcacaggaaggcgcgggaaggccacaacgaggcgagatggactcgggttgaatcacataaaatgggtccgacagctgtgagatttgaactcacgcgggttaccccaatagatttctagtctatcgccttaaccactcggccaagctgtcgttaaaatttgacacaaatccaaaccctcaccacattcaccgcaaacacacgtacgccaacgcacatccatgctaaccgcaccacaacctcctgcctaccattgcctacccttaccgtcgctgtcagcgcctacctacacacgcaacaaccaccactcacctctctcaccgaccgcgatactcgtatcgcgatgtctccggggctgcacgtggctcgttcgctatagaagctactagcggcttggacacggatgtgctgcgcactgaggtatggttacagcatgcgctgctggcccaggggccacgaacgagcggttgtaaagaaaaaggcaataagatatcggaggaggggatcgaaccctcgatcttgagcgtgttaagctcacgtcctaaccactagacgacaccgacactcgaacgatcacacaaccctcaaaccgtgccattttatcacacaattatcacgccgcacgcacgcacaaaacgacctataccgccaacttccagcgtcgactggacaccatatcgcactcgcatcgcccacagaccaccacgcatgcttcaagacgatcgcaggacccaaaacatctcgcgacttgacccctccatctacggtactcagcagcgctcggttggatcctcctcgcaatcagccggtcgcggcggtagtgtacacgccacctacctatcgaggagccaaacgggtcatctctttctgcgcacgggttgcttcggcatcatggcatcatgtgcccaaaccacactgtgtcgccggccttttggcccagcccaacacctcgaggcacactgccacgatcgtgcctgctgtgccgtgccagcagcggtcagtcccattgcctgacctacctgcggacagcgcagttggtttcgagcctggcggggtttggaaatcatccgttgagaaatggtcgcttacgaagcggacgggcgtgtgggaacgatggttgtagcgcaatctatggcgggcgtgtacaagtatccattgtgctgtcgagtcgcgtgtgatgagcagacgtggtggctgggtgcgtggcgtcacaggaaggcgcgggaaggccacaacgaggcgagatggactcgggttgaatcacataaaatgggtccgacagctgtgagatttgaactcacgcgggttaccccaatagatttctagtctatcgccttaaccactcggccaagctgtcgttaaaatttgacacaaatccaaaccctcaccacattcaccgcaaacacacgtacgccaacgcacatccatgctaaccgcaccacaacctcctgcctaccactgcctacccttaccgtcgctgtcagcgcctacctacacacgcaacaaccaccactcacctctctcaccgaccgcgatactcgtatcgcgatgtctccggggctgcacgtggctcgttcgctatagaagctactagcggcttggacacggatgtgctgcgcactgagctatggttacagcatgcgctgctggcccaggggccacgaacgagcggttgtaaagaaaaaggcaataagatatcggaggaggggatcgaaccctcgatcttgagcgtgttaagctcacgtcctaaccactagacgacaccgacactcgaacgatcacacaaccctcaaaccgtcccattttaccacacaattatcacgccgcacgcacgcacaaaacgacctataccgccaacttccagcgtcgactggacaccatatcgcactcgcatcgcccacagaccaccacgcatgcttcaagacgatcgcaggacccaaaacatctcgcgacttgacccctccatctacggtactcagcagcgctcggttggatcctcctcgcaatcagccggtcgcggcggtagtgtacacgccacctacctatcgaggagccaaacgggtcatctctttctgcgcacgggttgcttcggcatcatggcattatgtccttaagaaattgctggacggggaggccaattaggggaagtcattaaatgagtaagcctgctggatggggatcaagtacgcgccgggtcgaaaccccaacaattgtgcgtcttagtgtatgtcggaccagagctgagaaagaagaacaacgataaccgacaatgtatgactactgtgaaacaagaagatcctgctgattctgagcgaagtgaccctgcgtggacctggccagacatgtccggccaagaaattccgcccgaagtcctgggcagaaacatggatggtgggcgaatcatgatcacgaggacagtcgcgatgttgcgttggtgcatggagcagtgaatgatgtccggacgagannnnnnnnnnnnnnnnnnnnnnnnnnnnnnnnnnnnnnnnnnnnnnnnnnnnnnnnnnnnnnnnnnnnnnnnnnnnnnnnnnnnnnnnnnnnnnnnnnnnnnnnnnnnnnnnnnnnnnnnnnnnnnnnnnnnnnnnnnnnnnnnnnnnnnnnnnnnnnnnnnnnnnnnnnnnnnnnnnnnnnnnnnnnnnnnnnnnnnnnnnnnnnnnnnnnnnnnnnnnnnnnnnnnnnnnnnnnnnnnnnnnnnnnnnnnnnnnnnnnnnnnnnnnnnnnngcgcagttggtttcgagcctggcggggtttggaaatcatccgttgagaaatggtcgcttacgaagcggacgggcgtgtgggaacgatggttgtagcgcaatctatggcgggtgtgtacaagtatccattgtgctgtcgagtcgcgtgtgatgagcagacgtggtggctgggtgcgtggcgtcacaggaaggcgcgggaaggccacaacgaggcgagatggactcgggttgaatcacataaaatgggtccgacagctgtgagatttgaactcacgcgggttaccccaatagatttctagtctatcgccttaaccactcggccaagctgtcgttaaaattcgacacaaatccaaaccctcaccacattcaccgcaaacacacgtacgccaacgcacatccatgctaaccgcaccacaacctcctgcctaccattgcctacccttaccgtcgctgtcagcgcctacctacacacgcaacaaccaccactcacctctctcaccgaccgcgatactcgtatcgcgatgtctccggggctgcacgtggctcgttcgctatagaagctactagcggcttggacacggatgtgctgcgcactgagctatggttacagcatgcgctgctggcccaggggccacgaacgagcggttgtaaagaaaaaggcaataagatatcggaggaggggatcgaaccctcgatcttgagcgtgttaagctcacgtcctaaccactagacgacaccgacactcgaacgatcacacaaccctcaaaccgtcccattttatcacacaattatcacgccgcacgcacgcacaaaacgacctataccgccaacttccagcgtcgactggacaccatatcgcactcgcatcgcccacagaccaccacgcatgcttcaagacgatcgcaggacccaaaacacctcgcgacttgacccctccatctacggtactcagcagcgctcggttggatcctcctcgcaatcagccggtcgcggcggtagtgtacacgccacctacctatcgaggagccaaacgggtcatctctttctgcgcacgggttgcttcggcatcatggcatcatgtgcccaaaccacactgtgtcgccggccttttggcccagcccaacacctcgaggcacactgccacgatcgtgcctgctgtgccgtgccagcagcggtcagtcccattgcctgacctacctgcggacagcgcagttggtttcgagcctggcggggtttggaaatcatccgttgagaaatggtcgcttacgaagcggacgggcgtgtgggaacgatggttgtagcgcaatctatggcgggtgtgtacaagtatccattgtgctgtcgagtcgcgtgtgatgagcagacgtggtggctgggtgcgtggcgtcacaggaaggcgcgggaaggccacaacgaggcgagatggactcgggttgaatcacataaaatgggtccgacagctgtgagatttgaactcacgcgggttaccccaatagatttctagtctatcgccttaaccactcggccaagctgtcgttaaaattcgacacaaatccaaaccctcaccacattcaccgcaaacacacgtacgccaacgcacatccatgctaaccgcaccacaacctcctgcctaccattgcctacccttaccgtcgctgtcagcgcctacctacacacgcaacaaccaccactcacctctctcaccgaccgcgatactcgtatcgcgatgtctccggggctgcacgtggctcgttcgctatagaagctactagcggcttggacacggatgtgctgcgcactgagctatggttacagcatgcgctgctggtccaggggccacgaacgagcggttgtaatgaaaaaggcaataagatatcggaggaggggatcgaaccctcgatcttgagcgtgttaagctcacgtcctaaccactagacgacaccgacactcgaacgatcacacaaccctcaaaccgtgccattttatcacacaattatcacgccgcacgcacgcacaaaacgacctataccgccaacttccagcgtcgactggacaccatatcgcactcgcatcgcccacagaccaccacgcatgcttcaagacgatcgcaggacccaaaacatctcgcgacttgacccctccatctacggtactcagcagcgctcggttggatcctcctcgcaatcagccggtcgcggcggtagtgtacacgccacctacctatcgaggagccaaacgggtcatctctttctgcgcacgggttgcttcggcatcatggcatcatgtgcccaaaccacactgtgtcgccggccttttggcccagcccaacacctcgaggcacactgccacgatcgtgcctgctgtgccgtgccagcagcggtcagtcccattgcctgacctacctgcggacagcgcagttggtttcgagcctggcggggtttggaaatcatccgttgagaaatggtcgcttacgaagcggacgggcgtgtgggaacgatggttgtagcgcaatctatggcgggtgtgtacaagtatccattgtgctgtcgagtcgcgtgtgatgagcagacgtggtggctgggtgcgtggcgtcacaggaaggcgcgggaaggccacaacgaggcgagatggactcgggttgaatcacataaaatgggtccgacagctgtgagatttgaactcacgcgggttaccccaatagatttctagtctatcgccttaaccactcggccaagctgtcgttaaaattcgacacaaatccaaaccctcaccacattcaccgcaaacacacgtacgccaacgcacatccatgctaaccgcaccacaacctcctgcctaccattgcctacccttaccgtcgctgtcagcgcctacctacacacgcaacaaccaccactcacctctctcaccgaccgcgatactcgtatcgcgatgtctccggggctgcacgtggctcgttcgctatagaagctactagcggcttggacacggatgtgctgcgcactgagctatggttacagcatgcgctgctggcccaggggccacgaacgagcggttgtaaagaaaaaggcaataagatatcggaggaggggatcgaaccctcgatcttgagcgtgttaagctcacgtcctaaccactagacgacaccgacactcgaacgatcacacaaccctcaaaccgtcccattttaccacacaattatcacgccgcacgcacgcacaaaacgacctataccgccaacttccagcgtcgactggacaccatatcgcactcgcatcgcccacagaccaccacgcatgcttcaagacgatcgcaggacccaaaacatctcgcgacttgacccctccatctacggtactcagcagcgctcggttggatcctcctcgcaatcagccggtcgcggcggtagtgtacctatcgagggggatccnnnnnnnnnnnnnnnnnnnnnnnnnnnnnnnnnnnnnnnnnnnnnnnnnnnnnnnnnnnnnnnnnnnnnnnnnnnnnnnnnnnnnnnnnnnnnnnnnnnnnnnnnnnnnnnnnnnnnnnnnnnnnnnnnnnnnnnnnnnnnnnnnnnnnnnnnnnnnnnnnnnnnnnnnnnnnnnnnnnnnnnnnnnnnnnnnnnnnnnnnnnnnnnnnnnnnnnnnnnnnnnnnnnnnnnnnnnnnnnnnnnnnnnnnnattttgacacaaatccaaaccctcaccacattcaccgcaaacacacgtacgccaacgcacatccatgctaaccgcaccacaacctcctgcctaccattgcctacccttaccgtcgctgtcagcgcctacctacacacgcaacaaccaccactcacctctctcaccgaccgcgatactcgtatcgcgatgtctccggggctgcacgtggctcgttcgctatagaagctactagcggcttggacacggatgtgctgcgcactgagctatggttacagcatgcgctgctggcccaggggccacgaacgagcggttgtaaagaaaaaggcaataagatatcggaggaggggatcgaaccctcgatcttgagcgtgttaagctcacgtcctaaccactagacgacaccgacactcgaacgatcacacaaccctcaaaccgtcccattttaccacacaattatcacgccgcacgcacgcacaaaacgacctataccgccaacttccagcgtcgactggacaccatatcgcactcgcatcgcccacagaccaccacgcatgcttcaagacgatcgcaggacccaaaacatctcgcgacttgacccctccatctacggtactcagcagcgctcggttggatcctcctcgcaatcagccggtcgcggcggtagtgtacacgccacctacctatcgaggagccaaacgggtcatctctttctgcgcacgggttgcttcggcatcatggcatcatgtgcccaaaccacactgtgtcgccggccttttggcccagcccaacacctcgaggtacactgccacgatcgtgcctgctgtgccgtgccagcagcggtcagtcccattgcctgacctacctgcggacagcgcagttggtttcgagcctggcggggtttggaaatcatccgttgagaaatggtcgcttacgaagcggacgggcgtgtgggaacgatggttgtagcgcaatctatggcgggcgtgtacaagtatccattgtgctgtcgagtcgcgtgtgatgagcagacgtggtggctgggtgcgtggcgtcacaggaaggcgcgggaaggccacaacgaggcgagatggactcgggttgaatcacataaaatgggtccgacagctgtgagatttgaactcacgcgggttaccccaatagatttctagtctatcgccttaaccactcggccaagctgtcgttaaaattcgacacaaatccaaaccctcaccacattcaccgcaaacacacgtacgccaacgcacatccatgctaaccgcaccacaacctcctgcctaccattgcctacccttaccgtcgctgtcagcgcctacctacacacgcaacaaccaccactcacctctctcaccgaccgcgatactcgtatcgcgatgtctccggggctgcacgtggctcgttcgctatagaagctactagcggcttggacacggatgtgctgcgcactgagctatggttacagcatgcgctgctggcccaggggccacgaacgagcggttgtaaagaaaaaggcaataagatatcggaggaggggatcgaaccctcgatcttgagcgtgttaagctcacgtcctaaccactagacgacaccgacactcgaacgatcacacaaccctcaaaccgtcccattttatcacacaattatcacgccgcacgcacgcacaaaacgacctataccgccaacttccagcgtcgactggacaccatatcgcactcgcatcgcccacagatcaccacgcatgcttcaagacgatcgcaggacccaaaacatctcgcgacttgacccctccatctacggtactcagcagcgctcggttggatcctcctcgcaatcagccggtcgcggcggtagtgtacacgccacctacctatcgaggagccaaacgggtcatctctttctgcgcacgggttgcttcggcatcatggcatcctgtgcccaaaccacactgtgttcccggccttttggcccagcccaacacctcgaggcacactgccacgatcgtgcctgctgtgccgtgccagcagcggtcagtcccattgcctgacctacctgcggacagcgcagttggtttcgagcctggcggggtttggaaatcatccgttgagaaatggtcgcttacgaagcggacgggcgtgtgggaacgatggttgtagcgcaatctatggcgggcgtgtacaagtatccattgtgctgtcgagtcgcgtgtgatgagcagacgtggtggctgggtgcgtggcgtcacaggaaggcgcgggaaggccacaacgaggcgagatggactcgggttgaatcacataaaatgggtccgacagctgtgagatttgaactcacgcgggttaccccaatagatttctagtctatcgccttaaccactcggccaagctgtcgttaaaattcgacacaaatccaaaccctcaccacattcaccgcaaacacacgtacgccaacgcacatccatgctaaccgcaccacaacctcctgcctaccattgcctacccttaccgtcgctgtcagcgcctacctacacacgcaacaaccaccactcacctctctcaccgaccgcgatactcgtatcgcgatgtctccggggctgcacgtggctcgttcgctatagaagctactagcggcttggacacggatgtgctgcgcactgagctatggttacagcatgcgctgctggtccaggggccacgaacgagcggttgtaaagaaaaaggcaataagatatcggaggaggggatcgaaccctcgatcttgagcgtgttaagctcacgtcctaaccactagacgacaccgacactcgaacgatcacacaaccctcaaaccgtcccattttatcacacaattatcacgccgcacgcacgcacaaaacgacctataccgccaacttccagcgtcgactggacaccatatcgcactcgcatcgcccacagaccaccacgcatgcttcaagacgatcgcaggacccaaaacatctcgcgacttgacccctccatctacggtactcagcagcgctcggttggatcctcctcgcaatcagccggtcgcggcggtagtgtacacgccacctacctatcgaggagccaaacgggtcatctctttctgcgcacgggttgcttcggcatcatggcatcatgtgcccaaaccacactgtgtcgccggccttttggcccagcccaacacctcgaggcacactgccacgatcgtgcctgctgtgccgtgccagcagcggtcagtcccattgcctgacctacctgcggacagcgcagttggtttcgagcctggcggggtttggaaatcatccgttgagaaatggtcgcttacgaagcggacgggcgtgtgggaacgatggttgtagcgcaatctatgccgggcgtgtacaagtatccattgtgctgtcgagtcgcgtgtgatgagcagacgtggtggctgggtgcgtggcgtcacaggaaggcgcgggaaggccacaacgaggcgagatggactcgggttgaatcacataaaatgggtccgacagctgtgagatttgaactcacgcgggttaccccaatagatttctagtctatcgccttaaccactcggccaagctgtcgttaaaatttgacacaaatccaaaccctcaccacattcaccgcaaacacacgtacgccaacgcacatccatgctaaccgcaccacaacctcctgcctaccattgcctacccttaccgtcgctgtcagcgcctacctacacacgcaacaaccaccactcacctctctcaccgaccgcgatactcgtatcgcgatgtctccggggctgcacgtggctcgttcgctatagaagctactagcggcttggacacggatgtgctgcgcactgagctatggttacagcatgcgctgctggtccaggggccacgaacgagcggttgtaaagaaaaaggcaataagatatcggaggaggggatcgaaccctcgatcttgagcgtgttaagctcacgtcctaaccactagacgacaccgacactcgaacgatcacacaaccctcaaaccgtcccattttaccacacaattatcacgccgcacgcacgcacaaaacgacctataccgccaacttccagcgtcgactggacaccatatcgcactcgcatcgcccacagaccaccacgcatgcttcaagacgatcgcaggacccaaaacatctcgcgacttgacccctccatctacggtactcagcagcgctcggttggatcctcctcgcaatcagccggtcgcggcggtagtgtacacgccacctacctatcgaggagccaaacgggtcatctctttctgcgcacgggttgcttcggcatcatggcatcatgtgcccaaaccacactgtgtcgccggccttttggcccagcccaacacctcgaggcacactgccacgatcgtgcctgctgtgccgtgccagcagcggtcagtcccattgcctgacctacctgcggacagcgcagttggtttcgagcctggcggggtttggaaatcatccgttgagaaatggtcgcttacgaagcggacgggcgtgtgggaacgatggttgtagcgcaatctatggcgggcgtgtacaagtatccattgtgctgtcgagtcgcgtgtgatgagcagacgtggtggctgggtgcgtggcgtcacaggaaggcgcgggaaggccacaacgaggcgagatggactcgggttgaatcacataaaatgggtccgacagctgtgagatttgaactcacgcgggttaccccaatagatttctagtctatcgccttaaccactcggccaagctgtcgttaaaatttgacacaaatccaaaccctcatcacattcaccgcaaacacacgtacgccaacgcacatccatgctaaccgcaccacaacctcctgcctaccattgcctacccttaccgtcgctgtcagcgcctacctacacacgcaacaaccaccactcacctctctcaccgaccgcgatactcgtatcgcgatgtctccggggctgcacgtggctcgttcgctatagaagctactagcggcttggacacggatgtgctgcgcactgagctatggttacagcatgcgctgctggcccaggggccacgaacgagcggttgtaaagaaaaaggcaataagatatcggaggaggggatcgaaccctcgatcttgagcgtgttaagctcacgtcctaaccactagacgacaccgacactcgaacgatcacacaaccctcaaaccgtgccattttatcacacaattatcacgccgcacgcacgcacaaaacgacctataccgccaacttccagcgtcgactggacaccatatcgcactcgcatcgcccacagaccaccacgcatgcttcaagacgatcgcaggacccaaaacatctcgcgacttgacccctccatctacggtactcagcagcgctcggttggatcctcctcgcaatcagccggtcgcggcggtagtgtacacgccacctacctatcgaggagccaaacgggtcatctctttctgcgcacgggttgcttcggcatcatggcatcatgtgcccaaaccacactgtgtcgccggccttttggcccagcccaacacctcgaggcacactgccacgatcgtgcctgctgtgccgtgccagcagcggtcagtcccattgcctgacctacctgcggacagcgcagttggtttcgagcctggcggggtttggaaatcatccgttgagaaatggtcgcttacgaagcggacgggcgtgtgggaacgatggttgtagcgcaatctatggcgggcgtgtacaagtatccattgtgctgtcgagtcgcgtgtgatgagcagacgtggtggctgggtgcgtggcgtcacaggaaggcgcgggaaggccacaacgaggcgagatggactcgggttgaatcacataaaatgggtccgacagctgtgagatttgaactcacgcgggttaccccaatagatttctagtctatcgccttaaccactcggccaagctgtcgttaaaattcgacacaaatccaaaccctcaccacattcaccgcaaacacacgtacgccaacgcacatccatgctaaccgcaccacaacctcctgcctaccactgcctacccttaccgtcgctgtcagcgcctacctacacacgcaacaaccaccactcacctctctcaccgaccgcgatactcgtatcgcgatgtctccggggctgcacgtggctcgttcgctatagaagctactagcggcttggacacggatgtgctgcgcactgagctatggttacagcatgcgctgctggtccaggggccacgaacgagcggttgtaaagaaaaaggcaataagatatcggaggaggggatcgaaccctcgatcttgagcgtgttaagctcacgttctaaccactagacgacaccgacactcgaacgatcacacaaccctcaaaccgtcccattttaccacacaattatcacgccgcacgcacgcacaaaacgacctataccgccaacttccagcgtcgactggacaccatatcgcactcgcatcgcccacagaccaccacgcatgcttcaagacgatcgcaggacccaaaacatctcgcgacttgacccctccatctacggtactcagcagcgctcggttggatcctcctcgcaatcagccggtcgcggcggtagtgtacacgccacctacctatcgaggagccaaacgggtcatctctttctgcgcacgggttgcttcggcatcatggcatcatgtgcccaaaccacactgtgtcgccggccttttggcccagcccaacacctcgaggcacactgccacgatcgtgcctgctgtgccgtgccagcagcggtcagtcccattgcctgacctacctgcggacagcgcagttggtttcgagcctggcggggtttggaaatcatccgttgagaaatggtagcttacgaagcggacgggcgtgtgggaacgatggttgtagcgcaatctatggcgggcgtgtacaagtatccattgtgctgtcgagtcgcgtgtgatgagcagacgtggtggctgggtgcgtggcgtcacaggaaggcgcgggaaggccacaacgaggcgagatggactcgggttgaatcacataaaatgggtccgacagctgtgagatttgaactcacgcgggttaccccaatagatttctagtctatcgccttaaccactcggccaagctgtcgttaaaatttgacacaaatccaaaccctcaccacattcaccgcaaacacacgtacgccaacgcacatccatgctaaccgcaccacaacctcctgcctaccattgcctacccttaccgtcgctgtcagcgcctacctacacacgcaacaaccaccactcacctctctcaccgaccgcgatactcgtatcgcgatgtctccggggctgcacgtggctcgttcgctatagaagctactagcggcttggacacggatgtgctgcgcactgagctatggttacagcatgcgctgctggtccaggggccacgaacgagtggttgtaaagaaaaaggcaataagatatcggaggaggggatcgaaccctcgatcttgagcgtgttaagctcacgtcctaaccactagacgacaccgacactcgaacgatcacacaaccctcaaaccgtcccattttatcacacaattatcacgccgcacgcacgcacaaaacgacctataccgccaacttccagcgtcgactggacaccatatcgcactcgcatcgcccacagaccaccacgcatgcttcaagacgatcgcaggacccaaaacatctcgcgacttgacccctccatctacggtactcagcagcgctcggttggatcctcctcgcaatcagccggtcgcggcggtagtgtacacgccacctacctatcgaggagccaaacgggtcatctctttctgcgcacgggttgcttcggcatcatggcatcatgtgcccaaaccacactgtgtcgccggccttttggcccagcccaacacctcgaggcacactgccacgatcgtgcctgctgtgccgtgccagcagcggtcagtcccattgcctgacctacctgcggacagcgcagttggtttcgagcctggcggggtttggaaatcatccgttgagaaatggtcgcttacgaagcggacgggcgtgtgggaacgatggttgtagcgcaatctatggcgggcgtgtacaagtatccattgtgctgtcgagtcgcgtgtgatgagcagacgtggtggctgggtgcgtggcgtcacaggaaggcgcgggaaggccacaacgaggcgagatggactcgggttgaatcacataaaatgggtccgacagctgtgagatttgaactcacgcgggttaccccaatagatttctagtctatcgccttaaccactcggccaagcggtcgttaaaattgggggatcctcagagtcgacnnnnnnnnnnnnnnnnnnnnnnnnnnnnnnnnnnnnnnnnnnnnnnnnnnnnnnnnnnnnnnnnnnnnnnnnnnnnnnnnnnnnnnnnnnnnnnnnnnnnnnnnnnnnnnnnnnnnnnnnnnnnnnnnnnnnnnnnnnnnnnnnnnnnnnnnnnnnnnnnnnnnnnnnnnnnnnnnnnnnnnnnnnnnnnnnnnnnnnnnnnnnnnnnnnnnnnnnnnnnnnnnnnnnnnnnnnnnnnnnnnnnnnnnnnnnnnnnnnnnnnnnnnnnnnnnnnnnnnnnnnnnnnnnnnnnnnnnnnnnnnnnnnnnnnnnnnnnnnnnnnnnnnnnnnnnnnnnnnnnnnnnnnnnnnnnnnnnnnnnnnnnnnnnnnnnnnnnnnnnnnnnnnnnnnnnnnnnnnnnnnnnnnnnnnnnnnnnnnnnnnnnnnnnnnnnnnnnnnnnnnnnnnnnnnnnnnnnnnnnnnnnnnnnnnnnnnnnnnnnnnnnnnnnnnnnnnnnnnnnnnnnnnnnnnnnnnnnnnnnnnnnnnnnnnnnnnnnnnnnnnnnnnnnnnnnnnnnnnnnnnnnnnnnnnnnnnnnnnnnnnnnnnnnnnnnnnnnnnnnnnnnnnnnnnnnnnnnnnnnnnnnnnnnnnnnnnnnnnnnnnnnnnnnnnnnnnnnnnnnnnnnnnnnnnnnnnnnnnnnnnnnnnnnnnnnnnnnnnnnnnnnnnnnnnnnnnnnnnnnnnnnnnnnnnnnnnnnnnnnnnnnnnnnnnnnnnnnnnnnnnnnnnnnnnnnnnnnnnnnnnnnnnnnnnnnnnnnnnnnnnnnnnnnnnnnnnnnnnnnnnnnnnnnnnnnnnnnnnnnnnnnnnnnnnnnnnnnnnnnnnnnnnnnnnnnnnnnnnnnnnnnnnnnnnnnnnnnnnnnnnnnnnnnnnnnnnnnnnnnnnnnnnnnnnnnnnnnnnnnnnnnnnnnnnnnnnnnnnnnnnnnnnnnnnnnnnnnnnnnnnnnnnnnnnnnnnnnnnnnnnnnnnnnnnnnnnnnnnnnnnnnnnnnnnnnnnnnnnnnnnnnnnnnnnnnnnnnnnnnnnnnnnnnnnnnnnnnnnnnnnnnnnnnnnnnnnnnnnnnnnnnnnnnnnnnnnnnnnnnnnnnnnnnnnnnnnnnnnnnnnnnnnnnnnnnnnnnnnnnnnnnnnnnnnnnnnnnnnnnnnnnnnnnnnnnnnnnnnnnnnnnnnnnnnnnnnnnnnnnnnnnnnnnnnnnnnnnnnnnnnnnnnnnnnnnnnnnnnnnnnnnnnnnnnnnnnnnnnnnnnnnnnnnnnnnnnnnnnnnnnnnnnnnnnnnnnnnnnnnnnnnnnnnnnnnnnnnnnnnnnnnnnnnnnnnnnnnnnnnnnnnnnnnnnnnnnnnnnnnnnnnnnnnnnnnnnnnnnnnnnnnnnnnnnnnnnnnnnnnnnnnnnnnnnnnnnnnnnnnnnnnnnnnnnnnnnnnnnnnnnnnnnnnnnnnnnnnnnnnnnnnnnnnnnnnnnnnnnnnnnnnnnnnnnnnnnnnnnnnnnnnnnnnnnnnnnnnnnnnnnnnnnnnnnnnnnnnnnnnnnnnnnnnnnnnnnnnnnnnnnnnnnnnnnnnnnnnnnnnnnnnnnnnnnnnnnnnnnnnnnnnnnnnnnnnnnnnnnnnnnnnnnnnnnnnnnnnnnnnnnnnnnnnnnnnnnnnnnnnnnnnnnnnnnnnnnnnnnnnnnnnnnnnnnnnnnnnnnnnnnnnnnnnnnnnnnnnnnnnnnnnnnnnnnnnnnnnnnnnnnnnnnnnnnnnnnnnnnnnnnnnnnnnnnnnnnnnnnnnnnnnnnnnnnnnnnnnnnnnnnnnnnnnnnnnnnnnnnnnnnnnnnnnnnnnnnnnnnnnnnnnnnnnnnnnnnnnnnnnnnnnnnnnnnnnnnnnnnnnnnnnnnnnnnnnnnnnnnnnnnnnnnnnnnnnnnnnnnnnnnnnnnnnnnnnnnnnnnnnnnnnnnnnnnnnnnnnnnnnnnnnnnnnnnnnnnnnnnnnnnnnnnnnnnnnnnnnnnnnnnnnnnnnnnnnnnnnnntacacccttcaaaccgtcccattttaccacacaattatcacgccgcacgcacgcacaaaacgacctataccgccaacttccagcgtcgactggacaccatatcgcactcgcatcgcccacagatcaccacgcatgcttcaagacgatcgcaggacccaaaacatctcgcgacttgacccctccatctacggtactcagcagcgctcggttggatcctcctcgcaatcagccggtcgcggcggtagtgtacacgccacctacctatcgaggagccaaacgggtcatctctttctgcgcacgggttgcttcggcatcatggcatcatgtgcccaaaccacactgtgtcgccggccttttggcccagcccaacacctcgaggcacactgccacgatcgtgcctgctgtgccgtgccagcagcggtcagtcccattgcctgacctacctgcggacagcgcagttggtttcgagcctggcggggtttggaaatcatccgttgagaaatggtcgcttacgaagcggacgggcgtgtgggaacgatggttgtagcgcaatctatggcgggcgtgtacaagtatccattgtgctgtcgagtcgcgtgtgatgagcagacgtggtggctgggtgcgtggcgtcacaggaaggcgcgggaaggccacaacgaggcgagatggactcgggttgaatcacataaaatgggtccgacagctgtgagatttgaactcacgcgggttaccccaatagatttctagtctatcgccttaaccactcggccaagctgtcgttaaaattcgacacaaatccaaaccctcaccacattcaccgcaaacacacgtacgccaacgcacatccatgctaaccgcaccacaacctcctgcctaccactgcctacccttaccgtcgctgtcagcgcctacctacacacgcaacaaccaccactcacctctctcaccgaccgcgatactcgtatcgcgatgtctccggggctgcacgtggctcgttcgctatagaagctactagcggcttggacacggatgtgctgcgcactgagctatggttacagcatgcgctgctggtccaggggccacgaacgagcggttgtaaagaaaaaggcaataagatatcggaggaggggatcgaaccctcgatcttgagcgtgttaagctcacgttctaaccactagacgacaccgacactcgaacgatcacacaaccctcaaaccgtcccattttaccacacaattatcacgccgcacgcacgcacaaaacgacctataccgccaacttccagcgtcgactggacaccatatcgcactcgcatcgcccacagaccaccacgcatgcttcaagacgatcgcaggacccaaaacatctcgcgacttgacccctccatctacggtactcagcagcgctcggttggatcctcctcgcaatcagccggtcgcggcggtagtgtacacgccacctacctatcgaggagccaaacgggtcatctctttctgcgcacgggttgcttcggcatcatggcatcatgtgcccaaaccacactgtgtcgccggccttttggcccagcccaacacctcgaggcacactgccacgatcgtgcctgctgtgccgtgccagcagcggtcagtcccattgcctgacctacctgcggacagcgcagttggtttcgagcctggcggggtttggaaatcatccgttgagaaatggtcgcttacgaagcggacgggcgtgtgggaacgatggttgtagcgcaatctatggcgggcgtgtacaagtatccattgtgctgtcgagtcgcgtgtgatgagcagacgtggtggctgggtgcgtggcgtcacaggaaggcgcgggaaggccacaacgaggcgagatggactcgggttgaatcacataaaatgggtccgacagctgtgagatttgaactcacgcgggttaccccaatagatttctagtctatcgccttaaccactcggccaagctgtcgttaaaatttgacacaaatccaaaccctcaccatattcaccgcaaacacacgtacgccaacgcacatccatgctaaccgcaccacaacctcctgcctaccattgcctacccttaccgtcgctgtcagcgcctacctacacacgcaacaaccaccactcacctctctcaccgaccgcgatactcgtatcgcgatgtctccggggctgcacgtggctcgttcgctatagaagctactagcggcttggacacggatgtgctgcgcactgagctatggttacagcatgcgctgctggtccaggggccacgaacgagcggttgtaaagaaaaaggcaataagatatcggaggaggggatcgaaccctcgatcttgagcgtgttaagctcacgtcctaaccactagacgacaccgacactcgaacgatcacacaaccctcaaaccgtcccattttaccacacaattatcacgccgcacgcacgcacaaaacgacctataccgccaacttccagcgtcgactggacaccatatcgcactcgcatcgcccacagaccaccacgcatgcttcaagacgatcgcaggacccaaaacatctcgcgacttgacccctccatctacggtactcagcagcgctcggttggatcctcctcgcaatcagccggtcgcggcggtagtgtacacgccacctacctatcgaggagccaaacgggtcatctctttctgcgcacgggttgcttcggcatcatggcatcatgtgcccaaaccacactgtgtcgccggccttttggcccagcccaacacctcgaggcacactgccacgatcgtgcctgctgtgccgtgccagcagcggtcagtcccattgcctgacctacctgcggacagcgcagttggtttcgagcctggcggggtttggaaatcatccgttgagaaatggtcgcttacgaagcggacgggcgtgtgggaacgatggttgtagcgcaatctatggcgggcgtgtacaagtatccattgtgctgtcgagtcgcgtgtgatgagcagacgtggtggctgggtgcgtggcgtcacaggaaggcgcgggaaggccacaacgaggcgagatggactcgggttgaatcacataaaatgggtccgacagctgtgagatttgaactcacgcgggttaccccaatagatttctagtctatcgccttaaccactcggccaagctgtcgttaaaattcgacacaaatccaaaccctcaccacattcaccgcaaacacacgtacgccaacgcacatccatgctaaccgcaccacaacctcctgcctaccattgcctacccttaccgtcgctgtcagcgcctacctacacacgcaacaaccaccactcacctctctcaccgaccgcgatactcgtatcgcgatgtctccggggctgcacgtggctcgttcgctatagaagctactagcggcttggacacggatgtgctgcgcactgaggtatggttacagcatgcgctgctggtccaggggccacgaacgagtggttgtaaagaaaaaggcaataagatatcggaggaggggatcgaaccctcgatcttgagcgtgttaagctcacgtcctaaccactagacgacaccgacactcgaacgatcacacaaccctcaaaccgtcccattttaccacacaattatcacgccgcacgcacgcacaaaacgacctataccgccaacttccagcgtcgactggacaccatatcgcactcgcatcgcccacagaccaccacgcatgcttcaagacgatcgcaggacccaaaacatctcgcgacttgacccctccatctacggtactcagcagcgctcggttggatcctcctcgcaatcagccggtcgcggcggtagtgtacacgccacctacctatcgaggagccaaacgggtcatctctttctgcgcacgggttgcttcggcatcatggcatcatgtgcccaaaccacactgtgtcgccggccttttggcccagcccaacacctcgaggcacactgccacgatcgtgcctgctgtgccgtgccagcagcggtcagtcccattgcctgacctacctgcggacagcgcagttggtttcgagcctggcggggttggaaatcatccgtgagaaatggtcgctacaagcgacggnnnnnnnnnnnnnnnnnnnnnnnnnnnnnnnnnnnnnnnnnnnnnnnnnnnnnnnnnnnnnnnnnnnnnnnnnnnnnnnnnnnnnnnnnnnnnnnnnnnntatcgcgatgtctccggggctgcacgtggctcgttcgctatagaagctactagcggcttggacacggatgtgctgcgcactgagctatggttacagcatgcgctgctggcccaggggccacgaacgagcggttgtaaagaaaaaggcaataagatatcggaggaggggatcgaaccctcgatcttgagcgtgttaagctcacgtcctaaccactagacgacaccgacactcgaacgatcacacaaccctcaaaccgtcccattttaccacacaattatcacgccgcacgcacgcacaaaacgacctataccgccaacttccagcgtcgactggacaccatatcgcactcgcatcgcccacagaccaccacgcatgcttcaagacgatcgcaggacccaaaacatctcgcgacttgacccctccatctacggtactcagcagcgctcggttggatcctcctcgcaatcagccggtcgcggcggtagtgtacacgccacctacctatcgaggagccaaacgggtcatctctttctgcgcacgggttgcttcggcatcatggcatcatgtgcccaaaccacactgtgtcgccggccttttggcccagcccaacacctcgaggcacactgccacgatcgtgcctgctgtgccgtgccagcagcggtcagtcccattgcctgacctacctgcggacagcgcagttggtttcgagcctggcggggtttggaaatcatccgttgagaaatggtcgcttacgaagcggacgggcgtgtgggaacgatggttgtagcgcaatctatggcgggcgtgtacaagtatccattgtgctgtcgagtcgcgtgtgatgagcagacgtggtggctgggtgcgtggcgtcacaggaaggcgcgggaaggccacaatgaggcgagatggactcgggttgaatcacataaaatgggtccgacagctgtgagatttgaactcacgcgggttaccccaatagatttctagtctatcgccttaaccactcggccaagctgtcgttaaaatttgacacaaatccaaaccctcaccacattcaccgcaaacacacgtacgccaacgcacatccatgctaaccgcaccacaacctcctgcctaccattgcctacccttaccgtcgctgtcagcgcctacctacacacgcaacaaccaccactcacctctctcaccgaccgcgatactcgtatcgcgatgtctccggggctgcacgtggctcgttcgctatagaagctactagcggcttggacacggatgtgctgcgcactgagctatggttacagcatgcgctgctggtccaggggccacgaacgagtggttgtaaagaaaaaggcaataagatatcggaggaggggatcgaaccctcgatcttgagcgtgttaagctcacgtcctaaccactagacgacaccgacactcgaacgatcacacaaccctcaaaccgtcccattttaccacacaattatcacgccgcacgcacgcacaaaacgacctataccgccaacttccagcgtcgactggacaccatatcgcactcgcatcgcccacagaccaccacgcatgcttcaagacgatcgcaggacccaaaacatctcgcgacttgacccctccatctacggtactcagcagcgctcggttggatcctcctcgcaatcagccggtcgcggcggtagtgtacacgccacctacctatcgaggagccaaacgggtcatctctttctgcgcacgggttgcttcggcatcatggcatcatgtgcccaaaccacactgtgtcgccggccttttggcccagcccaacacctcgaggcacactgccacgatcgtgcctgctgtgccgtgccagcagcggtcagtcccattgcctgacctacctgcggacagcgcagttggtttcgagcctggcggggtttggaaatcatccgttgagaaatggtcgcttacgaagcggacgggcgtgtgggaacgatggttgtagcgcaatctatggcgggcgtgtacaagtatccattgtgctgtcgagtcgcgtgtgatgagcagacgtggtggctgggtgcgtggcgtcacaggaaggcgcgggaaggccacaatgaggcgagatggactcgggttgaatcacataaaatgggtccgacagctgtgagatttgaactcacgcgggttaccccaatagatttctagtctatcgccttaaccactcggccaagctgtcgttaaattttgacacaaatccaaaccctcaccacattcaccgcaaacacacgtacgccaacgcacatccatgctaaccgcaccacaacctcctgcctaccattgcctacccttaccgtcgctgtcagcgcctacctacacacgcaacaaccaccactcacctctctcaccgaccgcgatactcgtatcgcgatgtctccggggctgcacgtggctcgttcgctatagaagctactagcggcttggacacggatgtgctgcgcactgagctatggttacagcatgcgctgctggcccaggggccacgaacgagcggttgtaatgaaaaaggcaataagatatcggaggaggggatcgaaccctcgatcttgagcgtgttaagctcacgtcctaaccactagacgacaccgacactcgaacgatcacacaaccctcaaaccgtgccattttatcacacaattatcacgccgcacgcacgcacaaaacgacctataccgccaacttccagcgtcgactggacaccatatcgcactcgcatcgcccacagaccaccacgcatgcttcaagacgatcgcaggacccaaaacatctcgcgacttgacccctccatctacggtactcagcagcgctcggttggatcctcctcgcaatcagccggtcgcggcggtagtgtacacgccacctacctatcgaggagccaaacgggtcatctctttctgcgcacgggttgcttcggcatcatggcatcatgtgcccaaaccacactgtgtcgccggccttttggcccagcccaacacctcgaggcacactgccacgatcgtgcctgctgtgccgtgccagcagcggtcagtcccattgcctgacctacctgcggacagcgcagttggtttcgagcctggcggggtttggaaatcatccgttgagaaatggtcgcttacgaagcggacgggcgtgtgggaacgatggttgtagcgcaatctatggcgggcgtgtacaagtatccattgtgctgtcgagtcgcgtgtgatgagcagacgtggtggctgggtgcgtggcgtcacaggaaggcgcgggaaggccacaacgaggcgagatggactcgggttgaatcacataaaatgggtccgacagctgtgagatttgaactcacgcgggttaccccaatagatttctagtctatcgccttaaccactcggccaagctgtcgttaaaatttgacacaaatccaaaccctcagcacattcaccgcaaacacacgtacgccaacgcacatccatgctaaccgcaccacaacctcctgcctaccattgcctacccttaccgtcgctgtcagcgcctacctacacacgcaacaaccaccactcacctctctcaccgaccgcgatactcgtatcgcgatgtctccggggctgcacgtggctcgttcgctatagaagctactagcggcttggacacggatgtgctgcgcactgagctatggttacagcatgcgctgctggtccaggggccacgaacgagcggttgtaaagaaaaaggcaataagatatcggaggaggggatcgaaccctcgatcttgagcgtgttaagctcacgtcctaaccactagacgacaccgacactcgaacgatcacacaaccctcaaaccgtcccattttaccacacaattatcacgccgcacgcacgcacaaaacgacctataccgccaacttccagcgtcgactggacaccatatcgcactcgcatcgcccacagaccaccacgcatgcttcaagacgatcgcaggacccaaaacatctcgcgacttgacccctccatctacggtactcagcagcgctcggttggatcctcctcgcaatcagccggtcgcggcggtagtgtacacgccacctacctatcgaggagccaaacgggtcatctctttctgcgcacgggttgcttcggcatcatggcatcatgtgcccaaaccacactgtgtcgccggccttttggcccagcccaacacctcgaggcacactgccacgatcgtgcctgctgtgccgtgccagcagcggtcagtcccattgcctgacctacctgcggacagcgcagttggtttcgagcctggcggggtttggaaatcatccgttgagaaatggtagcttacgaagcggacgggcgtgtgggaacgatggttgtagcgcaatctatggcgggcgtgtacaagtatccattgtgctgtcgagtcgcgtgtgatgagcagacgtggtggctgggtgcgtggcgtcacaggaaggcgcgggaaggccacaacgaggcgagatggactcgggttgaatcacataaaatgggtccgacagctgtgagatttgaactcacgcgggttaccccaatagatttctagtctatcgccttaaccactcggccaagctgtcgttaaaattgacacaaatccaaaccctcatcacattcaccgcaaacacacgtacgccaacgcacatccatgctaaccgcaccacaacctcctgcctaccattgcctacccttaccgtcgctgtcagcgcctacctacacacgcaacaaccaccactcacctctctcaccgaccgcgatactcgtatcgcgatgtctccggggctgcacgtggctcgttcgctatagaagctactagcggcttggacacggatgtgctgcgcactgaactatggttacagcatgcgctgctggcccaggggccacgaacgagcggttgtaaagaaaaaggcaataagatatcggaggaggggatcgaaccctcgatcttgagcgtgttaagctcacgtcctaaccactagacgacaccgacactcgaacgatcacacaaccctcaaaccgtcccattttatcacacaattatcacgccgcacgcacgcacaaaacgacctataccgccaacttccagcgtcgactggacaccatatcgcactcgcatcgcccacagaccaccacgcatgcttcaagacgatcgcaggacccaaaacatctcgcgacttgacccctccatctacggtactcagcagcgctcggttggatcctcctcgcaatcagccggtcgcggcggtagtgtacacgccacctacctatcgaggagccaaacgggtcatctctttctgcgcacgggttgcttcggcatcatggcatcatgtgcccaaaccacactgtgtcgccggccttttggcccagcccaacacctcgaggcacactgccacgatcgtgcctgctgtgccgtgccagcagcggtcagtcccattgcctgacctacctgcggacagcgcagttggtttcgagcctggcggggtttggaaatcatccgttgagaaatggtcgcttacgaagcggacgggcgtgtgggaacgatggttgtagcgcaatctatggcgggcgtgtacaagtatccattgtgctgtcgagtcgcgtgtgatgagcagacgtggtggctgggtgcgtggcgtcacaggaaggcgcgggaaggccacaacgaggcgagatggacacgggttgaatcacataaaatgggtccgacagctgtgagatttgaactcacgcgggttaccccaatagatttctagtctatcgccttaaccactcggccaagctgtcgttaaaattcgacacaaatccaaaccctcatcacattcaccgcaaacacacgtacgccaacgcacatccatgctaaccgcaccacaacctcctgcctaccattgcctacccttaccgtcgctgtcagcgcctacctacacacgcaacaaccaccactcacctctctcaccgaccgcgatactcgtatcgcgatgtctccggggctgcacgtggctcgttcgctatagaagctactagcggcttggacacggatgtgctgcgcactgagctatggttacagcatgcgctgctggcccaggggccacgaacgagcggttgtaaagaaaaaggcaataagatatcggaggaggggatcgaaccctcgatcttgagcgtgttaagctcacgtcctaaccactagacgacaccgacactcgaacgatcacacaaccctcaaaccgtgccattttatcacacaattatcacgccgcacgcacgcacaaaacgacctataccgccaacttccagcgtcgactggacaccatatcgcactcgcatcgcccacagaccaccacgcatgcttcaagacgatcgcaggacccaaaacatctcgcgacttgacccctccatctacggtactcagcagcgctcggttggatcctcctcgcaatcagccggtcgcggcggtagtgtacacgccacctacctatcgaggagccaaacgggtcatctctttctgcgcacgggttgcttcggcatcatggcatcatgtgcccaaaccacactgtgtcgccggccttttggcccagcccacacctcgannnnnnnnnnnnnnnnnnnnnnnnnnnnnnnnnnnnnnnnnnnnnnnnnnnnnnnnnnnnnnnnnnnnnnnnnnnnnnnnnnnnnnnnnnnnnnnnnnnnnnnnnnnnnnnnnnnnnnnnnnnnnnnnnnnnnnnnnnnnnnnnnnnnnnnnnnnnnnnnnnnnnnnnnnnnnnnnnnnnnnnnnnnnnnnnnnnnnnnnnnnnnnnnnnnnnnnnnnnnnnnnnnnnnnnnnnnnnnnnnnnnnnnnnnnnnnnnnnnnnnnnnnnnnnnnnnnnnnnnnnnnnnnnnnnnnnnnnnnnnnnnnnnnnnnnnnnnnnnnnnnnnnnnnnnnnnnnnnnnnnnnnnnnnnnnnnnnnnnnnnnnnnnnnnnnnnnnnnnnnnnnnnnnnnnnnnnnnnnnnnnnnnnnnnnnnnnnnnnnnnnnnnnnnnnnnnnnnnnnnnnnnnnnnnnnnnnnnnnnnnnnnnnnnnnnnnnnnnnnnnnnnnnnnnnnnnnnnnnnnnnnnnnnnnnnnnnnnnnnnnnnnnnnnnnnnnnnnnnnnnnnnnnnnnnnnnnnnnnnnnnnnnnnnnnnnnnnnnnnnnnnnnnnnnnnnnnnnnnnnnnnnnnnnnnnnnnnnnnnnnnnnnnnnnnnnnnnnnnnnnnnnnnnnnnnnnnnnnnnnnnnnnnnnnnnnnnnnnnnnnnnnnnnnnnnnnnnnnnnnnnnnnnnnnnnnnnnnnnnnnnnnnnnnnnnnnnnnnnnnnnnnnnnnnnnnnnnnnnnnnnnnnnnnnnnnnnnnnnnnnnnnnnnnnnnnnnnnnnnnnnnnnnnnnnnnnnnnnnnnnnnnnnnnnnnnnnnnnnnnnnnnnnnnnnnnnnnnnnnnnnnnnnnnnnnnnnnnnnnnnnnnnnnnnnnnnnnnnnnnnnnnnnnnnnnnnnnnnnnnnnnnnnnnnnnnnnnnnnnnnnnnnnnnnnnnnnnnnnnnnnnnnnnnnnnnnnnnnnnnnnnnnnnnnnnnnnnnnnnnnnnnnnnnnnnnnnnnnnnnnnnnnnnnnnnnnnnnnnnnnnnnnnnnnnnnnnnnnnnnnnnnnnnnnnnnnnnnnnnnnnnnnnnnnnnnnnnnnnnnnnnnnnnnnnnnnnnnnnnnnnnnnnnnnnnnnnnnnnnnnnnnnnnnnnnnnnnnnnnnnnnnnnnnnnnnnnnnnnnnnnnnnnnnnnnnnnnnnnnnnnnnnnnnnnnnnnnnnnnnnnnnnnnnnnnnnnnnnnnnnnnnnnnnnnnnnnnnnnnnnnnnnnnnnnnnnnnnnnnnnnnnnnnnnnnnnnnnnnnnnnnnnnnnnnnnnnnnnnnnnnnnnnnnnnnnnnnnnnnnnnnnnnnnnnnnnnnnnnnnnnnnnnnnnnnnnnnnnnnnnnnnnnnnnnnnnnnnnnnnnnnnnnnnnnnnnnnnnnnnnnnnnnnnnnnnnnnnnnnnnnnnnnnnnnnnnnnnnnnnnnnnnnnnnnnnnnnnnnnnnnnnnnnnnnnnnnnnnnnnnnnnnnnnnnnnnnnnnnnnnnnnnnnnnnnnnnnnnnnnnnnnnnnnnnnnnnnnnnnnnnnnnnnnnnnnnnnnnnnnnnnnnnnnnnnnnnnnnnnnnnnnnnnnnnnnnnnnnnnnnnnnnnnnnnnnnnnnnnnnnnnnnnnnnnnnnnnnnnnnnnnnnnnnnnnnnnnnnnnnnnnnnnnnnnnnnnnnnnnnnnnnnnnnnnnnnnnnnnnnnnnnnnnnnnnnnnnnnnnnnnnnnnnnnnnnnnnnnnnnnnnnnnnnnnnnnnnnnnnnnnnnnnnnnnnnnnnnnnnnnnnnnnnnnnnnnnnnnnnnnnnnnnnnnnnnnnnnnnnnnnnnnnnnnnnnnnnnnnnnnnnnnnnnnnnnnnnnnnnnnnnnnnnnnnnnnnnnnnnnnnnnnnnnnnnnnnnnnnnnnnnnnnnnnnnnnnnnnnnnnnnnnnnnnnnnnnnnnnnnnnnnnnnnnnnnnnnnnnnnnnnnnnnnnnnnnnnnnnnnnnnnnnnnnnnnnnnnnnnnnnnnnnnnnnnnnnnnnnnnnnnnnnnnnnnnnnnnnnnnnnnnnnnnnnnnnnnnnnnnnnnnnnnnnnnnnnnnnnnnnnnnnnnnnnnnnnnnnnnnnnnnnnnnnnnnnnnnnnnnnnnnnnnnnnnnnnnnnnnnnnnnnnnnnnnnnnnnnnnnnnnnnnnnnnnnnnnnnnnnnnnnnnnnnnnnnnnnnnnnnnnnnnnnnnnnnnnnnnnnnnnnnnnnnnnnnnnnnnnnnnnnnnnnnnnnnnnnnnnnnnnnnnnnnnnnnnnnnnnnnnnnnnnnnnnnnnnnnnnnnnnnnnnnnnnnnnnnnnnnnnnnnnnnnnnnnnnnnnnnnnnnnnnnnnnnnnnnnnnnnnnnnnnnnnnnnnnnnnnnnnnnnnnnnnnnnnnnnnnnnnnnnnnnnnnnnnnnnnnnnnnnnnnnnnnnnnnnnnnnnnnnnnnnnnnnnnnnnnnnnnnnnnnnnnnnnnnnnnnnnnnnnnnnnnnnnnnnnnnnnnnnnnnnnnnnnnnnnnnnnnnnnnnnnnnnnnnnnnnnnnnnnnnnnnnnnnnnnnnnnnnnnnnnnnnnnnnnnnnnnnnnnnnnnnnnnnnnnnnnnnnnnnnnnnnnnnnnnnnnnnnnnnnnnnnnnnnnnnnnnnnnnnnnnnnnnnnnnnnnnnnnnnnnnnnnnnnnnnnnnnnnnnnnnnnnnnnnnnnnnnnnnnnnnnnnnnnnnnnnnnnnnnnnnnnnnnnnnnnnnnnnnnnnnnnnnnnnnnnnnnnnnnnnnnnnnnnnnnnnnnnnnnnnnnnnnnnnnnnnnnnnnnnnnnnnnnnnnnnnnnnnnnnnnnnnnnnnnnnnnnnnnnnnnnnnnnnnnnnnnnnnnnnnnnnnnnnnnnnnnnnnnnnnnnnnnnnnnnnnnnnnnnnnnnnnnnnnnnnnnnnnnnnnnnnnnnnnnnnnnnnnnnnnnnnnnnnnnnnnnnnnnnnnnnnnnnnnnnnnnnnnnnnnnnnnnnnnnnnnnnnnnnnnnnnnnnnnnnnnnnnnnnnnnnnnnnnnnnnnnnnnnnnnnnnnnnnnnnnnnnnnnnnnnnnnnnnnnnnnnnnnnnnnnnnnnnnnnnnnnnnnnnnnnnnnnnnnnnnnnnnnnnnnnnnnnnnnnnnnnnnnnnnnnnnnnnnnnnnnnnnnnnnnnnnnnnnnnnnnnnnnnnnnnnnnnnnnnnnnnnnnnnnnnnnnnnnnnnnnnnnnnnnnnnnnnnnnnnnnnnnnnnnnnnnnnnnnnnnnnnnnnnnnnnnnnnnnnnnnnnnnnnnnnnnnnnnnnnnnnnnnnnnnnnnnnnnnnnnnnnnnnnnnnnnnnnnnnnnnnnnnnnnnnnnnnnnnnnnnnnnnnnnnnnnnnnnnnnnnnnnnnnnnnnnnnnnnnnnnnnnnnnnnnnnnnnnnnnnnnnnnnnnnnnnnnnnnnnnnnnnnnnnnnnnnnnnnnnnnnnnnnnnnnnnnnnnnnnnnnnnnnnnnnnnnnnnnnnnnnnnnnnnnnnnnnnnnnnnnnnnnnnnnnnnnnnnnnnnnnnnnnnnnnnnnnnnnnnnnnnnnnnnnnnnnnnnnnnnnnnnnnnnnnnnnnnnnnnnnnnnnnnnnnnnnnnnnnnnnnnnnnnnnnnnnnnnnnnnnnnnnnnnnnnnnnnnnnnnnnnnnnnnnnnnnnnnnnnnnnnnnnnnnnnnnnnnnnnnnnnnnnnnnnnnnnnnnnnnnnnnnnnnnnnnnnnnnnnnnnnnnnnnnnnnnnnnnnnnnnnnnnnnnnnnnnnnnnnnnnnnnnnnnnnnnnnnnnnnnnnnnnnnnnnnnnnnnnnnnnnnnnnnnnnnnnnnnnnnnnnnnnnnnnnnnnnnnnnnnnnnnnnnnnnnnnnnnnnnnnnnnnnnnnnnnnnnnnnnnnnnnnnnnnnnnnnnnnnnnnnnnnnnnnnnnnnnnnnnnnnnnnnnnnnnnnnnnnnnnnnnnnnnnnnnnnnnnnnnnnnnnnnnnnnnnnnnnnnnnnnnnnnnnnnnnnnnnnnnnnnnnnnnnnnnnnnnnnnnnnnnnnnnnnnnnnnnnnnnnnnnnnnnnnnnnnnnnnnnnnnnnnnnnnnnnnnnnnnnnnnnnnnnnnnnnnnnnnnnnnnnnnnnnnnnnnnnnnnnnnnnnnnnnnnnnnnnnnnnnnnnnnnnnnnnnnnnnnnnnnnnnnnnnnnnnnnnnnnnnnnnnnnnnnnnnnnnnnnnnnnnnnnnnnnnnnnnnnnnnnnnnnnnnnnnnnnnnnnnnnnnnnnnnnnnnnnnnnnnnnnnnnnnnnnnnnnnnnnnnnnnnnnnnnnnnnnnnnnnnnnnnnnnnnnnnnnnnnnnnnnnnnnnnnnnnnnnnnnnnnnnnnnnnnnnnnnnnnnnnnnnnnnnnnnnnnnnnnnnnnnnnnnnnnnnnnnnnnnnnnnnnnnnnnnnnnnnnnnnnnnnnnnnnnnnnnnnnnnnnnnnnnnnnnnnnnnnnnnnnnnnnnnnnnnnnnnnnnnnnnnnnnnnnnnnnnnnnnnnnnnnnnnnnnnnnnnnnnnnnnnnnnnnnnnnnnnnnnnnnnnnnnnnnnnnnnnnnnnnnnnnnnnnnnnnnnnnnnnnnnnnnnnnnnnnnnnnnnnnnnnnnnnnnnnnnnnnnnnnnnnnnnnnnnnnnnnnnnnnnnnnnnnnnnnnnnnnnnnnnnnnnnnnnnnnnnnnnnnnnnnnnnnnnnnnnnnnnnnnnnnnnnnnnnnnnnnnnnnnnnnnnnnnnnnnnnnnnnnnnnnnnnnnnnnnnnnnnnnnnnnnnnnnnnnnnnnnnnnnnnnnnnnnnnnnnnnnnnnnnnnnnnnnnnnnnnnnnnnnnnnnnnnnnnnnnnnnnnnnnnnnnnnnnnnnnnnnnnnnnnnnnnnnnnnnnnnnnnnnnnnnnnnnnnnnnnnnnnnnnnnnnnnnnnnnnnnnnnnnnnnnnnnnnnnnnnnnnnnnnnnnnnnnnnnnnnnnnnnnnnnnnnnnnnnnnnnnnnnnnnnnnnnnnnnnnnnnnnnnnnnnnnnnnnnnnnnnnnnnnnnnnnnnnnnnnnnnnnnnnnnnnnnnnnnnnnnnnnnnnnnnnnnnnnnnnnnnnnnnnnnnnnnnnnnnnnnnnnnnnnnnnnnnnnnnnnnnnnnnnnnnnnnnnnnnnnnnnnnnnnnnnnnnnnnnnnnnnnnnnnnnnnnnnnnnnnnnnnnnnnnnnnnnnnnnnnnnnnnnnnnnnnnnnnnnnnnnnnnnnnnnnnnnnnnnnnnnnnnnnnnnnnnnnnnnnnnnnnnnnnnnnnnnnnnnnnnnnnnnnnnnnnnnnnnnnnnnnnnnnnnnnnnnnnnnnnnnnnnnnnnnnnnnnnnnnnnnnnnnnnnnnnnnnnnnnnnnnnnnnnnnnnnnnnnnnnnnnnnnnnnnnnnnnnnnnnnnnnnnnnnnnnnnnnnnnnnnnnnnnnnnnnnnnnnnnnnnnnnnnnnnnnnnnnnnnnnnnnnnnnnnnnnnnnnnnnnnnnnnnnnnnnnnnnnnnnnnnnnnnnnnnnnnnnnnnnnnnnnnnnnnnnnnnnnnnnnnnnnnnnnnnnnnnnnnnnnnnnnnnnnnnnnnnnnnnnnnnnnnnnnnnnnnnnnnnnnnnnnnnnnnnnnnnnnnnnnnnnnnnnnnnnnnnnnnnnnnnnnnnnnnnnnnnnnnnnnnnnnnnnnnnnnnnnnnnnnnnnnnnnnnnnnnnnnnnnnnnnnnnnnnnnnnnnnnnnnnnnnnnnnnnnnnnnnnnnnnnnnnnnnnnnnnnnnnnnnnnnnnnnnnnnnnnnnnnnnnnnnnnnnnnnnnnnnnnnnnnnnnnnnnnnnnnnnnnnnnnnnnnnnnnnnnnnnnnnnnnnnnnnnnnnnnnnnnnnnnnnnnnnnnnnnnnnnnnnnnnnnnnnnnnnnnnnnnnnnnnnnnnnnnnnnnnnnnnnnnnnnnnnnnnnnnnnnnnnnnnnnnnnnnnnnnnnnnnnnnnnnnnnnnnnnnnnnnnnnnnnnnnnnnnnnnnnnnnnnnnnnnnnnnnnnnnnnnnnnnnnnnnnnnnnnnnnnnnnnnnnnnnnnnnnnnnnnnnnnnnnnnnnnnnnnnnnnnnnnnnnnnnnnnnnnnnnnnnnnnnnnnnnnnnnnnnnnnnnnnnnnnnnnnnnnnnnnnnnnnnnnnnnnnnnnnnnnnnnnnnnnnnnnnnnnnnnnnnnnnnnnnnnnnnnnnnnnnnnnnnnnnnnnnnnnnnnnnnnnnnnnnnnnnnnnnnnnnnnnnnnnnnnnnnnnnnnnnnnnnnnnnnnnnnnnnnnnnnnnnnnnnnnnnnnnnnnnnnnnnnnnnnnnnnnnnnnnnnnnnnnnnnnnnnnnnnnnnnnnnnnnnnnnnnnnnnnnnnnnnnnnnnnnnnnnnnnnnnnnnnnnnnnnnnnnnnnnnnnnnnnnnnnnnnnnnnnnnnnnnnnnnnnnnnnnnnnnnnnnnnnnnnnnnnnnnnnnnnnnnnnnnnnnnnnnnnnnnnnnnnnnnnnnnnnnnnnnnnnnnnnnnnnnnnnnnnnnnnnnnnnnnnnnnnnnnnnnnnnnnnnnnnnnnnnnnnnnnnnnnnnnnnnnnnnnnnnnnnnnnnnnnnnnnnnnnnnnnnnnnnnnnnnnnnnnnnnnnnnnnnnnnnnnnnnnnnnnnnnnnnnnnnnnnnnnnnnnnnnnnnnnnnnnnnnnnnnnnnnnnnnnnnnnnnnnnnnnnnnnnnnnnnnnnnnnnnnnnnnnnnnnnnnnnnnnnnnnnnnnnnnnnnnnnnnnnnnnnnnnnnnnnnnnnnnnnnnnnnnnnnnnnnnnnnnnnnnnnnnnnnnnnnnnnnnnnnnnnnnnnnnnnnnnnnnnnnnnnnnnnnnnnnnnnnnnnnnnnnnnnnnnnnnnnnnnnnnnnnnnnnnnnnnnnnnnnnnnnnnnnnnnnnnnnnnnnnnnnnnnnnnnnnnnnnnnnnnnnnnnnnnnnnnnnnnnnnnnnnnnnnnnnnnnnnnnnnnnnnnnnnnnnnnnnnnnnnnnnnnnnnnnnnnnnnnnnnnnnnnnnnnnnnnnnnnnnnnnnnnnnnnnnnnnnnnnnnnnnnnnnnnnnnnnnnnnnnnnnnnnnnnnnnnnnnnnnnnnnnnnnnnnnnnnnnnnnnnnnnnnnnnnnnnnnnnnnnnnnnnnnnnnnnnnnnnnnnnnnnnnnnnnnnnnnnnnnnnnnnnnnnnnnnnnnnnnnnnnnnnnnnnnnnnnnnnnnnnnnnnnnnnnnnnnnnnnnnnnnnnnnnnnnnnnnnnnnnnnnnnnnnnnnnnnnnnnnnnnnnnnnnnnnnnnnnnnnnnnnnnnnnnnnnnnnnnnnnnnnnnnnnnnnnnnnnnnnnnnnnnnnnnnnnnnnnnnnnnnnnnnnnnnnnnnnnnnnnnnnnnnnnnnnnnnnnnnnnnnnnnnnnnnnnnnnnnnnnnnnnnnnnnnnnnnnnnnnnnnnnnnnnnnnnnnnnnnnnnnnnnnnnnnnnnnnnnnnnnnnnnnnnnnnnnnnnnnnnnnnnnnnnnnnnnnnnnnnnnnnnnnnnnnnnnnnnnnnnnnnnnnnnnnnnnnnnnnnnnnnnnnnnnnnnnnnnnnnnnnnnnnnnnnnnnnnnnnnnnnnnnnnnnnnnnnnnnnnnnnnnnnnnnnnnnnnnnnnnnnnnnnnnnnnnnnnnnnnnnnnnnnnnnnnnnnnnnnnnnnnnnnnnnnnnnnnnnnnnnnnnnnnnnnnnnnnnnnnnnnnnnnnnnnnnnnnnnnnnnnnnnnnnnnnnnnnnnnnnnnnnnnnnnnnnnnnnnnnnnnnnnnnnnnnnnnnnnnnnnnnnnnnnnnnnnnnnnnnnnnnnnnnnnnnnnnnnnnnnnnnnnnnnnnnnnnnnnnnnnnnnnnnnnnnnnnnnnnnnnnnnnnnnnnnnnnnnnnnnnnnnnnnnnnnnnnnnnnnnnnnnnnnnnnnnnnnnnnnnnnnnnnnnnnnnnnnnnnnnnnnnnnnnnnnnnnnnnnnnnnnnnnnnnnnnnnnnnnnnnnnnnnnnnnnnnnnnnnnnnnnnnnnnnnnnnnnnnnnnnnnnnnnnnnnnnnnnnnnnnnnnnnnnnnnnnnnnnnnnnnnnnnnnnnnnnnnnnnnnnnnnnnnnnnnnnnnnnnnnnnnnnnnnnnnnnnnnnnnnnnnnnnnnnnnnnnnnnnnnnnnnnnnnnnnnnnnnnnnnnnnnnnnnnnnnnnnnnnnnnnnnnnnnnnnnnnnnnnnnnnnnnnnnnnnnnnnnnnnnnnnnnnnnnnnnnnnnnnnnnnnnnnnnnnnnnnnnnnnnnnnnnnnnnnnnnnnnnnnnnnnnnnnnnnnnnnnnnnnnnnnnnnnnnnnnnnnnnnnnnnnnnnnnnnnnnnnnnnnnnnnnnnnnnnnnnnnnnnnnnnnnnnnnnnnnnnnnnnnnnnnnnnnnnnnnnnnnnnnnnnnnnnnnnnnnnnnnnnnnnnnnnnnnnnnnnnnnnnnnnnnnnnnnnnnnnnnnnnnnnnnnnnnnnnnnnnnnnnnnnnnnnnnnnnnnnnnnnnnnnnnnnnnnnnnnnnnnnnnnnnnnnnnnnnnnnnnnnnnnnnnnnnnnnnnnnnnnnnnnnnnnnnnnnnnnnnnnnnnnnnnnnnnnnnnnnnnnnnnnnnnnnnnnnnnnnnnnnnnnnnnnnnnnnnnnnnnnnnnnnnnnnnnnnnnnnnnnnnnnnnnnnnnnnnnnnnnnnnnnnnnnnnnnnnnnnnnnnnnnnnnnnnnnnnnnnnnnnnnnnnnnnnnnnnnnnnnnnnnnnnnnnnnnnnnnnnnnnnnnnnnnnnnnnnnnnnnnnnnnnnnnnnnnnnnnnnnnnnnnnnnnnnnnnnnnnnnnnnnnnnnnnnnnnnnnnnnnnnnnnnnnnnnnnnnnnnnnnnnnnnnnnnnnnnnnnnnnnnnnnnnnnnnnnnnnnnnnnnnnnnnnnnnnnnnnnnnnnnnnnnnnnnnnnnnnnnnnnnnnnnnnnnnnnnnnnnnnnnnnnnnnnnnnnnnnnnnnnnnnnnnnnnnnnnnnnnnnnnnnnnnnnnnnnnnnnnnnnnnnnnnnnnnnnnnnnnnnnnnnnnnnnnnnnnnnnnnnnnnnnnnnnnnnnnnnnnnnnnnnnnnnnnnnnnnnnnnnnnnnnnnnnnnnnnnnnnnnnnnnnnnnnnnnnnnnnnnnnnnnnnnnnnnnnnnnnnnnnnnnnnnnnnnnnnnnnnnnnnnnnnnnnnnnnnnnnnnnnnnnnnnnnnnnnnnnnnnnnnnnnnnnnnnnnnnnnnnnnnnnnnnnnnnnnnnnnnnnnnnnnnnnnnnnnnnnnnnnnnnnnnnnnnnnnnnnnnnnnnnnnnnnnnnnnnnnnnnnnnnnnnnnnnnnnnnnnnnnnnnnnnnnnnnnnnnnnnnnnnnnnnnnnnnnnnnnnnnnnnnnnnnnnnnnnnnnnnnnnnnnnnnnnnnnnnnnnnnnnnnnnnnnnnnnnnnnnnnnnnnnnnnnnnnnnnnnnnnnnnnnnnnnnnnnnnnnnnnnnnnnnnnnnnnnnnnnnnnnnnnnnnnnnnnnnnnnnnnnnnnnnnnnnnnnnnnnnnnnnnnnnnnnnnnnnnnnnnnnnnnnnnnnnnnnnnnnnnnnnnnnnnnnnnnnnnnnnnnnnnnnnnnnnnnnnnnnnnnnnnnnnnnnnnnnnnnnnnnnnnnnnnnnnnnnnnnnnnnnnnnnnnnnnnnnnnnnnnnnnnnnnnnnnnnnnnnnnnnnnnnnnnnnnnnnnnnnnnnnnnnnnnnnnnnnnnnnnnnnnnnnnnnnnnnnnnnnnnnnnnnnnnnnnnnnnnnnnnnnnnnnnnnnnnnnnnnnnnnnnnnnnnnnnnnnnnnnnnnnnnnnnnnnnnnnnnnnnnnnnnnnnnnnnnnnnnnnnnnnnnnnnnnnnnnnnnnnnnnnnnnnnnnnnnnnnnnnnnnnnnnnnnnnnnnnnnnnnnnnnnnnnnnnnnnnnnnnnnnnnnnnnnnnnnnnnnnnnnnnnnnnnnnnnnnnnnnnnnnnnnnnnnnnnnnnnnnnnnnnnnnnnnnnnnnnnnnnnnnnnnnnnnnnnnnnnnnnnnnnnnnnnnnnnnnnnnnnnnnnnnnnnnnnnnnnnnnnnnnnnnnnnnnnnnnnnnnnnnnnnnnnnnnnnnnnnnnnnnnnnnnnnnnnnnnnnnnnnnnnnnnnnnnnnnnnnnnnnnnnnnnnnnnnnnnnnnnnnnnnnnnnnnnnnnnnnnnnnnnnnnnnnnnnnnnnnnnnnnnnnnnnnnnnnnnnnnnnnnnnnnnnnnnnnnnnnnnnnnnnnnnnnnnnnnnnnnnnnnnnnnnnnnnnnnnnnnnnnnnnnnnnnnnnnnnnnnnnnnnnnnnnnnnnnnnnnnnnnnnnnnnnnnnnnnnnnnnnnnnnnnnnnnnnnnnnnnnnnnnnnnnnnnnnnnnnnnnnnnnnnnnnnnnnnnnnnnnnnnnnnnnnnnnnnnnnnnnnnnnnnnnnnnnnnnnnnnnnnnnnnnnnnnnnnnnnnnnnnnnnnnnnnnnnnnnnnnnnnnnnnnnnnnnnnnnnnnnnnnnnnnnnnnnnnnnnnnnnnnnnnnnnnnnnnnnnnnnnnnnnnnnnnnnnnnnnnnnnnnnnnnnnnnnnnnnnnnnnnnnnnnnnnnnnnnnnnnnnnnnnnnnnnnnnnnnnnnnnnnnnnnnnnnnnnnnnnnnnnnnnnnnnnnnnnnnnnnnnnnnnnnnnnnnnnnnnnnnnnnnnnnnnnnnnnnnnnnnnnnnnnnnnnnnnnnnnnnnnnnnnnnnnnnnnnnnnnnnnnnnnnnnnnnnnnnnnnnnnnnnnnnnnnnnnnnnnnnnnnnnnnnnnnnnnnnnnnnnnnnnnnnnnnnnnnnnnnnnnnnnnnnnnnnnnnnnnnnnnnnnnnnnnnnnnnnnnnnnnnnnnnnnnnnnnnnnnnnnnnnnnnnnnnnnnnnnnnnnnnnnnnnnnnnnnnnnnnnnnnnnnnnnnnnnnnnnnnnnnnnnnnnnnnnnnnnnnnnnnnnnnnnnnnnnnnnnnnnnnnnnnnnnnnnnnnnnnnnnnnnnnnnnnnnnnnnnnnnnnnnnnnnnnnnnnnnnnnnnnnnnnnnnnnnnnnnnnnnnnnnnnnnnnnnnnnnnnnnnnnnnnnnnnnnnnnnnnnnnnnnnnnnnnnnnnnnnnnnnnnnnnnnnnnnnnnnnnnnnnnnnnnnnnnnnnnnnnnnnnnnnnnnnnnnnnnnnnnnnnnnnnnnnnnnnnnnnnnnnnnnnnnnnnnnnnnnnnnnnnnnnnnnnnnnnnnnnnnnnnnnnnnnnnnnnnnnnnnnnnnnnnnnnnnnnnnnnnnnnnnnnnnnnnnnnnnnnnnnnnnnnnnnnnnnnnnnnnnnnnnnnnnnnnnnnnnnnnnnnnnnnnnnnnnnnnnnnnnnnnnnnnnnnnnnnnnnnnnnnnnnnnnnnnnnnnnnnnnnnnnnnnnnnnnnnnnnnnnnnnnnnnnnnnnnnnnnnnnnnnnnnnnnnnnnnnnnnnnnnnnnnnnnnnnnnnnnnnnnnnnnnnnnnnnnnnnnnnnnnnnnnnnnnnnnnnnnnnnnnnnnnnnnnnnnnnnnnnnnnnnnnnnnnnnnnnnnnnnnnnnnnnnnnnnnnnnnnnnnnnnnnnnnnnnnnnnnnnnnnnnnnnnnnnnnnnnnnnnnnnnnnnnnnnnnnnnnnnnnnnnnnnnnnnnnnnnnnnnnnnnnnnnnnnnnnnnnnnnnnnnnnnnnnnnnnnnnnnnnnnnnnnnnnnnnnnnnnnnnnnnnnnnnnnnnnnnnnnnnnnnnnnnnnnnnnnnnnnnnnnnnnnnnnnnnnnnnnnnnnnnnnnnnnnnnnnnnnnnnnnnnnnnnnnnnnnnnnnnnnnnnnnnnnnnnnnnnnnnnnnnnnnnnnnnnnnnnnnnnnnnnnnnnnnnnnnnnnnnnnnnnnnnnnnnnnnnnnnnnnnnnnnnnnnnnnnnnnnnnnnnnnnnnnnnnnnnnnnnnnnnnnnnnnnnnnnnnnnnnnnnnnnnnnnnnnnnnnnnnnnnnnnnnnnnnnnnnnnnnnnnnnnnnnnnnnnnnnnnnnnnnnnnnnnnnnnnnnnnnnnnnnnnnnnnnnnnnnnnnnnnnnnnnnnnnnnnnnnnnnnnnnnnnnnnnnnnnnnnnnnnnnnnnnnnnnnnnnnnnnnnnnnnnnnnnnnnnnnnnnnnnnnnnnnnnnnnnnnnnnnnnnnnnnnnnnnnnnnnnnnnnnnnnnnnnnnnnnnnnnnnnnnnnnnnnnnnnnnnnnnnnnnnnnnnnnnnnnnnnnnnnnnnnnnnnnnnnnnnnnnnnnnnnnnnnnnnnnnnnnnnnnnnnnnnnnnnnnnnnnnnnnnnnnnnnnnnnnnnnnnnnnnnnnnnnnnnnnnnnnnnnnnnnnnnnnnnnnnnnnnnnnnnnnnnnnnnnnnnnnnnnnnnnnnnnnnnnnnnnnnnnnnnnnnnnnnnnnnnnnnnnnnnnnnnnnnnnnnnnnnnnnnnnnnnnnnnnnnnnnnnnnnnnnnnnnnnnnnnnnnnnnnnnnnnnnnnnnnnnnnnnnnnnnnnnnnnnnnnnnnnnnnnnnnnnnnnnnnnnnnnnnnnnnnnnnnnnnnnnnnnnnnnnnnnnnnnnnnnnnnnnnnnnnnnnnnnnnnnnnnnnnnnnnnnnnnnnnnnnnnnnnnnnnnnnnnnnnnnnnnnnnnnnnnnnnnnnnnnnnnnnnnnnnnnnnnnnnnnnnnnnnnnnnnnnnnnnnnnnnnnnnnnnnnnnnnnnnnnnnnnnnnnnnnnnnnnnnnnnnnnnnnnnnnnnnnnnnnnnnnnnnnnnnnnnnnnnnnnnnnnnnnnnnnnnnnnnnnnnnnnnnnnnnnnnnnnnnnnnnnnnnnnnnnnnnnnnnnnnnnnnnnnnnnnnnnnnnnnnnnnnnnnnnnnnnnnnnnnnnnnnnnnnnnnnnnnnnnnnnnnnnnnnnnnnnnnnnnnnnnnnnnnnnnnnnnnnnnnnnnnnnnnnnnnnnnnnnnnnnnnnnnnnnnnnnnnnnnnnnnnnnnnnnnnnnnnnnnnnnnnnnnnnnnnnnnnnnnnnnnnnnnnnnnnnnnnnnnnnnnnnnnnnnnnnnnnnnnnnnnnnnnnnnnnnnnnnnnnnnnnnnnnnnnnnnnnnnnnnnnnnnnnnnnnnnnnnnnnnnnnnnnnnnnnnnnnnnnnnnnnnnnnnnnnnnnnnnnnnnnnnnnnnnnnnnnnnnnnnnnnnnnnnnnnnnnnnnnnnnnnnnnnnnnnnnnnnnnnnnnnnnnnnnnnnnnnnnnnnnnnnnnnnnnnnnnnnnnnnnnnnnnnnnnnnnnnnnnnnnnnnnnnnnnnnnnnnnnnnnnnnnnnnnnnnnnnnnnnnnnnnnnnnnnnnnnnnnnnnnnnnnnnnnnnnnnnnnnnnnnnnnnnnnnnnnnnnnnnnnnnnnnnnnnnnnnnnnnnnnnnnnnnnnnnnnnnnnnnnnnnnnnnnnnnnnnnnnnnnnnnnnnnnnnnnnnnnnnnnnnnnnnnnnnnnnnnnnnnnnnnnnnnnnnnnnnnnnnnnnnnnnnnnnnnnnnnnnnnnnnnnnnnnnnnnnnnnnnnnnnnnnnnnnnnnnnnnnnnnnnnnnnnnnnnnnnnnnnnnnnnnnnnnnnnnnnnnnnnnnnnnnnnnnnnnnnnnnnnnnnnnnnnnnnnnnnnnnnnnnnnnnnnnnnnnnnnnnnnnnnnnnnnnnnnnnnnnnnnnnnnnnnnnnnnnnnnnnnnnnnnnnnnnnnnnnnnnnnnnnnnnnnnnnnnnnnnnnnnnnnnnnnnnnnnnnnnnnnnnnnnnnnnnnnnnnnnnnnnnnnnnnnnnnnnnnnnnnnnnnnnnnnnnnnnnnnnnnnnnnnnnnnnnnnnnnnnnnnnnnnnnnnnnnnnnnnnnnnnnnnnnnnnnnnnnnnnnnnnnnnnnnnnnnnnnnnnnnnnnnnnnnnnnnnnnnnnnnnnnnnnnnnnnnnnnnnnnnnnnnnnnnnnnnnnnnnnnnnnnnnnnnnnnnnnnnnnnnnnnnnnnnnnnnnnnnnnnnnnnnnnnnnnnnnnnnnnnnnnnnnnnnnnnnnnnnnnnnnnnnnnnnnnnnnnnnnnnnnnnnnnnnnnnnnnnnnnnnnnnnnnnnnnnnnnnnnnnnnnnnnnnnnnnnnnnnnnnnnnnnnnnnnnnnnnnnnnnnnnnnnnnnnnnnnnnnnnnnnnnnnnnnnnnnnnnnnnnnnnnnnnnnnnnnnnnnnnnnnnnnnnnnnnnnnnnnnnnnnnnnnnnnnnnnnnnnnnnnnnnnnnnnnnnnnnnnnnnnnnnnnnnnnnnnnnnnnnnnnnnnnnnnnnnnnnnnnnnnnnnnnnnnnnnnnnnnnnnnnnnnnnnnnnnnnnnnnnnnnnnnnnnnnnnnnnnnnnnnnnnnnnnnnnnnnnnnnnnnnnnnnnnnnnnnnnnnnnnnnnnnnnnnnnnnnnnnnnnnnnnnnnnnnnnnnnnnnnnnnnnnnnnnnnnnnnnnnnnnnnnnnnnnnnnnnnnnnnnnnnnnnnnnnnnnnnnnnnnnnnnnnnnnnnnnnnnnnnnnnnnnnnnnnnnnnnnnnnnnnnnnnnnnnnnnnnnnnnnnnnnnnnnnnnnnnnnnnnnnnnnnnnnnnnnnnnnnnnnnnnnnnnnnnnnnnnnnnnnnnnnnnnnnnnnnnnnnnnnnnnnnnnnnnnnnnnnnnnnnnnnnnnnnnnnnnnnnnnnnnnnnnnnnnnnnnnnnnnnnnnnnnnnnnnnnnnnnnnnnnnnnnnnnnnnnnnnnnnnnnnnnnnnnnnnnnnnnnnnnnnnnnnnnnnnnnnnnnnnnnnnnnnnnnnnnnnnnnnnnnnnnnnnnnnnnnnnnnnnnnnnnnnnnnnnnnnnnnnnnnnnnnnnnnnnnnnnnnnnnnnnnnnnnnnnnnnnnnnnnnnnnnnnnnnnnnnnnnnnnnnnnnnnnnnnnnnnnnnnnnnnnnnnnnnnnnnnnnnnnnnnnnnnnnnnnnnnnnnnnnnnnnnnnnnnnnnnnnnnnnnnnnnnnnnnnnnnnnnnnnnnnnnnnnnnnnnnnnnnnnnnnnnnnnnnnnnnnnnnnnnnnnnnnnnnnnnnnnnnnnnnnnnnnnnnnnnnnnnnnnnnnnnnnnnnnnnnnnnnnnnnnnnnnnnnnnnnnnnnnnnnnnnnnnnnnnnnnnnnnnnnnnnnnnnnnnnnnnnnnnnnnnnnnnnnnnnnnnnnnnnnnnnnnnnnnnnnnnnnnnnnnnnnnnnnnnnnnnnnnnnnnnnnnnnnnnnnnnnnnnnnnnnnnnnnnnnnnnnnnnnnnnnnnnnnnnnnnnnnnnnnnnnnnnnnnnnnnnnnnnnnnnnnnnnnnnnnnnnnnnnnnnnnnnnnnnnnnnnnnnnnnnnnnnnnnnnnnnnnnnnnnnnnnnnnnnnnnnnnnnnnnnnnnnnnnnnnnnnnnnnnnnnnnnnnnnnnnnnnnnnnnnnnnnnnnnnnnnnnnnnnnnnnnnnnnnnnnnnnnnnnnnnnnnnnnnnnnnnnnnnnnnnnnnnnnnnnnnnnnnnnnnnnnnnnnnnnnnnnnnnnnnnnnnnnnnnnnnnnnnnnnnnnnnnnnnnnnnnnnnnnnnnnnnnnnnnnnnnnnnnnnnnnnnnnnnnnnnnnnnnnnnnnnnnnnnnnnnnnnnnnnnnnnnnnnnnnnnnnnnnnnnnnnnnnnnnnnnnnnnnnnnnnnnnnnnnnnnnnnnnnnnnnnnnnnnnnnnnnnnnnnnnnnnnnnnnnnnnnnnnnnnnnnnnnnnnnnnnnnnnnnnnnnnnnnnnnnnnnnnnnnnnnnnnnnnnnnnnnnnnnnnnnnnnnnnnnnnnnnnnnnnnnnnnnnnnnnnnnnnnnnnnnnnnnnnnnnnnnnnnnnnnnnnnnnnnnnnnnnnnnnnnnnnnnnnnnnnnnnnnnnnnnnnnnnnnnnnnnnnnnnnnnnnnnnnnnnnnnnnnnnnnnnnnnnnnnnnnnnnnnnnnnnnnnnnnnnnnnnnnnnnnnnnnnnnnnnnnnnnnnnnnnnnnnnnnnnnnnnnnnnnnnnnnnnnnnnnnnnnnnnnnnnnnnnnnnnnnnnnnnnnnnnnnnnnnnnnnnnnnnnnnnnnnnnnnnnnnnnnnnnnnnnnnnnnnnnnnnnnnnnnnnnnnnnnnnnnnnnnnnnnnnnnnnnnnnnnnnnnnnnnnnnnnnnnnnnnnnnnnnnnnnnnnnnnnnnnnnnnnnnnnnnnnnnnnnnnnnnnnnnnnnnnnnnnnnnnnnnnnnnnnnnnnnnnnnnnnnnnnnnnnnnnnnnnnnnnnnnnnnnnnnnnnnnnnnnnnnnnnnnnnnnnnnnnnnnnnnnnnnnnnnnnnnnnnnnnnnnnnnnnnnnnnnnnnnnnnnnnnnnnnnnnnnnnnnnnnnnnnnnnnnnnnnnnnnnnnnnnnnnnnnnnnnnnnnnnnnnnnnnnnnnnnnnnnnnnnnnnnnnnnnnnnnnnnnnnnnnnnnnnnnnnnnnnnnnnnnnnnnnnnnnnnnnnnnnnnnnnnnnnnnnnnnnnnnnnnnnnnnnnnnnnnnnnnnnnnnnnnnnnnnnnnnnnnnnnnnnnnnnnnnnnnnnnnnnnnnnnnnnnnnnnnnnnnnnnnnnnnnnnnnnnnnnnnnnnnnnnnnnnnnnnnnnnnnnnnnnnnnnnnnnnnnnnnnnnnnnnnnnnnnnnnnnnnnnnnnnnnnnnnnnnnnnnnnnnnnnnnnnnnnnnnnnnnnnnnnnnnnnnnnnnnnnnnnnnnnnnnnnnnnnnnnnnnnnnnnnnnnnnnnnnnnnnnnnnnnnnnnnnnnnnnnnnnnnnnnnnnnnnnnnnnnnnnnnnnnnnnnnnnnnnnnnnnnnnnnnnnnnnnnnnnnnnnnnnnnnnnnnnnnnnnnnnnnnnnnnnnnnnnnnnnnnnnnnnnnnnnnnnnnnnnnnnnnnnnnnnnnnnnnnnnnnnnnnnnnnnnnnnnnnnnnnnnnnnnnnnnnnnnnnnnnnnnnnnnnnnnnnnnnnnnnnnnnnnnnnnnnnnnnnnnnnnnnnnnnnnnnnnnnnnnnnnnnnnnnnnnnnnnnnnnnnnnnnnnnnnnnnnnnnnnnnnnnnnnnnnnnnnnnnnnnnnnnnnnnnnnnnnnnnnnnnnnnnnnnnnnnnnnnnnnnnnnnnnnnnnnnnnnnnnnnnnnnnnnnnnnnnnnnnnnnnnnnnnnnnnnnnnnnnnnnnnnnnnnnnnnnnnnnnnnnnnnnnnnnnnnnnnnnnnnnnnnnnnnnnnnnnnnnnnnnnnnnnnnnnnnnnnnnnnnnnnnnnnnnnnnnnnnnnnnnnnnnnnnnnnnnnnnnnnnnnnnnnnnnnnnnnnnnnnnnnnnnnnnnnnnnnnnnnnnnnnnnnnnnnnnnnnnnnnnnnnnnnnnnnnnnnnnnnnnnnnnnnnnnnnnnnnnnnnnnnnnnnnnnnnnnnnnnnnnnnnnnnnnnnnnnnnnnnnnnnnnnnnnnnnnnnnnnnnnnnnnnnnnnnnnnnnnnnnnnnnnnnnnnnnnnnnnnnnnnnnnnnnnnnnnnnnnnnnnnnnnnnnnnnnnnnnnnnnnnnnnnnnnnnnnnnnnnnnnnnnnnnnnnnnnnnnnnnnnnnnnnnnnnnnnnnnnnnnnnnnnnnnnnnnnnnnnnnnnnnnnnnnnnnnnnnnnnnnnnnnnnnnnnnnnnnnnnnnnnnnnnnnnnnnnnnnnnnnnnnnnnnnnnnnnnnnnnnnnnnnnnnnnnnnnnnnnnnnnnnnnnnnnnnnnnnnnnnnnnnnnnnnnnnnnnnnnnnnnnnnnnnnnnnnnnnnnnnnnnnnnnnnnnnnnnnnnnnnnnnnnnnnnnnnnnnnnnnnnnnnnnnnnnnnnnnnnnnnnnnnnnnnnnnnnnnnnnnnnnnnnnnnnnnnnnnnnnnnnnnnnnnnnnnnnnnnnnnnnnnnnnnnnnnnnnnnnnnnnnnnnnnnnnnnnnnnnnnnnnnnnnnnnnnnnnnnnnnnnnnnnnnnnnnnnnnnnnnnnnnnnnnnnnnnnnnnnnnnnnnnnnnnnnnnnnnnnnnnnnnnnnnnnnnnnnnnnnnnnnnnnnnnnnnnnnnnnnnnnnnnnnnnnnnnnnnnnnnnnnnnnnnnnnnnnnnnnnnnnnnnnnnnnnnnnnnnnnnnnnnnnnnnnnnnnnnnnnnnnnnnnnnnnnnnnnnnnnnnnnnnnnnnnnnnnnnnnnnnnnnnnnnnnnnnnnnnnnnnnnnnnnnnnnnnnnnnnnnnnnnnnnnnnnnnnnnnnnnnnnnnnnnnnnnnnnnnnnnnnnnnnnnnnnnnnnnnnnnnnnnnnnnnnnnnnnnnnnnnnnnnnnnnnnnnnnnnnnnnnnnnnnnnnnnnnnnnnnnnnnnnnnnnnnnnnnnnnnnnnnnnnnnnnnnnnnnnnnnnnnnnnnnnnnnnnnnnnnnnnnnnnnnnnnnnnnnnnnnnnnnnnnnnnnnnnnnnnnnnnnnnnnnnnnnnnnnnnnnnnnnnnnnnnnnnnnnnnnnnnnnnnnnnnnnnnnnnnnnnnnnnnnnnnnnnnnnnnnnnnnnnnnnnnnnnnnnnnnnnnnnnnnnnnnnnnnnnnnnnnnnnnnnnnnnnnnnnnnnnnnnnnnnnnnnnnnnnnnnnnnnnnnnnnnnnnnnnnnnnnnnnnnnnnnnnnnnnnnnnnnnnnnnnnnnnnnnnnnnnnnnnnnnnnnnnnnnnnnnnnnnnnnnnnnnnnnnnnnnnnnnnnnnnnnnnnnnnnnnnnnnnnnnnnnnnnnnnnnnnnnnnnnnnnnnnnnnnnnnnnnnnnnnnnnnnnnnnnnnnnnnnnnnnnnnnnnnnnnnnnnnnnnnnnnnnnnnnnnnnnnnnnnnnnnnnnnnnnnnnnnnnnnnnnnnnnnnnnnnnnnnnnnnnnnnnnnnnnnnnnnnnnnnnnnnnnnnnnnnnnnnnnnnnnnnnnnnnnnnnnnnnnnnnnnnnnnnnnnnnnnnnnnnnnnnnnnnnnnnnnnnnnnnnnnnnnnnnnnnnnnnnnnnnnnnnnnnnnnnnnnnnnnnnnnnnnnnnnnnnnnnnnnnnnnnnnnnnnnnnnnnnnnnnnnnnnnnnnnnnnnnnnnnnnnnnnnnnnnnnnnnnnnnnnnnnnnnnnnnnnnnnnnnnnnnnnnnnnnnnnnnnnnnnnnnnnnnnnnnnnnnnnnnnnnnnnnnnnnnnnnnnnnnnnnnnnnnnnnnnnnnnnnnnnnnnnnnnnnnnnnnnnnnnnnnnnnnnnnnnnnnnnnnnnnnnnnnnnnnnnnnnnnnnnnnnnnnnnnnnnnnnnnnnnnnnnnnnnnnnnnnnnnnnnnnnnnnnnnnnnnnnnnnnnnnnnnnnnnnnnnnnnnnnnnnnnnnnnnnnnnnnnnnnnnnnnnnnnnnnnnnnnnnnnnnnnnnnnnnnnnnnnnnnnnnnnnnnnnnnnnnnnnnnnnnnnnnnnnnnnnnnnnnnnnnnnnnnnnnnnnnnnnnnnnnnnnnnnnnnnnnnnnnnnnnnnnnnnnnnnnnnnnnnnnnnnnnnnnnnnnnnnnnnnnnnnnnnnnnnnnnnnnnnnnnnnnnnnnnnnnnnnnnnnnnnnnnnnnnnnnnnnnnnnnnnnnnnnnnnnnnnnnnnnnnnnnnnnnnnnnnnnnnnnnnnnnnnnnnnnnnnnnnnnnnnnnnnnnnnnnnnnnnnnnnnnnnnnnnnnnnnnnnnnnnnnnnnnnnnnnnnnnnnnnnnnnnnnnnnnnnnnnnnnnnnnnnnnnnnnnnnnnnnnnnnnnnnnnnnnnnnnnnnnnnnnnnnnnnnnnnnnnnnnnnnnnnnnnnnnnnnnnnnnnnnnnnnnnnnnnnnnnnnnnnnnnnnnnnnnnnnnnnnnnnnnnnnnnnnnnnnnnnnnnnnnnnnnnnnnnnnnnnnnnnnnnnnnnnnnnnnnnnnnnnnnnnnnnnnnnnnnnnnnnnnnnnnnnnnnnnnnnnnnnnnnnnnnnnnnnnnnnnnnnnnnnnnnnnnnnnnnnnnnnnnnnnnnnnnnnnnnnnnnnnnnnnnnnnnnnnnnnnnnnnnnnnnnnnnnnnnnnnnnnnnnnnnnnnnnnnnnnnnnnnnnnnnnnnnnnnnnnnnnnnnnnnnnnnnnnnnnnnnnnnnnnnnnnnnnnnnnnnnnnnnnnnnnnnnnnnnnnnnnnnnnnnnnnnnnnnnnnnnnnnnnnnnnnnnnnnnnnnnnnnnnnnnnnnnnnnnnnnnnnnnnnnnnnnnnnnnnnnnnnnnnnnnnnnnnnnnnnnnnnnnnnnnnnnnnnnnnnnnnnnnnnnnnnnnnnnnnnnnnnnnnnnnnnnnnnnnnnnnnnnnnnnnnnnnnnnnnnnnnnnnnnnnnnnnnnnnnnnnnnnnnnnnnnnnnnnnnnnnnnnnnnnnnnnnnnnnnnnnnnnnnnnnnnnnnnnnnnnnnnnnnnnnnnnnnnnnnnnnnnnnnnnnnnnnnnnnnnnnnnnnnnnnnnnnnnnnnnnnnnnnnnnnnnnnnnnnnnnnnnnnnnnnnnnnnnnnnnnnnnnnnnnnnnnnnnnnnnnnnnnnnnnnnnnnnnnnnnnnnnnnnnnnnnnnnnnnnnnnnnnnnnnnnnnnnnnnnnnnnnnnnnnnnnnnnnnnnnnnnnnnnnnnnnnnnnnnnnnnnnnnnnnnnnnnnnnnnnnnnnnnnnnnnnnnnnnnnnnnnnnnnnnnnnnnnnnnnnnnnnnnnnnnnnnnnnnnnnnnnnnnnnnnnnnnnnnnnnnnnnnnnnnnnnnnnnnnnnnnnnnnnnnnnnnnnnnnnnnnnnnnnnnnnnnnnnnnnnnnnnnnnnnnnnnnnnnnnnnnnnnnnnnnnnnnnnnnnnnnnnnnnnnnnnnnnnnnnnnnnnnnnnnnnnnnnnnnnnnnnnnnnnnnnnnnnnnnnnnnnnnnnnnnnnnnnnnnnnnnnnnnnnnnnnnnnnnnnnnnnnnnnnnnnnnnnnnnnnnnnnnnnnnnnnnnnnnnnnnnnnnnnnnnnnnnnnnnnnnnnnnnnnnnnnnnnnnnnnnnnnnnnnnnnnnnnnnnnnnnnnnnnnnnnnnnnnnnnnnnnnnnnnnnnnnnnnnnnnnnnnnnnnnnnnnnnnnnnnnnnnnnnnnnnnnnnnnnnnnnnnnnnnnnnnnnnnnnnnnnnnnnnnnnnnnnnnnnnnnnnnnnnnnnnnnnnnnnnnnnnnnnnnnnnnnnnnnnnnnnnnnnnnnnnnnnnnnnnnnnnnnnnnnnnnnnnnnnnnnnnnnnnnnnnnnnnnnnnnnnnnnnnnnnnnnnnnnnnnnnnnnnnnnnnnnnnnnnnnnnnnnnnnnnnnnnnnnnnnnnnnnnnnnnnnnnnnnnnnnnnnnnnnnnnnnnnnnnnnnnnnnnnnnnnnnnnnnnnnnnnnnnnnnnnnnnnnnnnnnnnnnnnnnnnnnnnnnnnnnnnnnnnnnnnnnnnnnnnnnnnnnnnnnnnnnnnnnnnnnnnnnnnnnnnnnnnnnnnnnnnnnnnnnnnnnnnnnnnnnnnnnnnnnnnnnnnnnnnnnnnnnnnnnnnnnnnnnnnnnnnnnnnnnnnnnnnnnnnnnnnnnnnnnnnnnnnnnnnnnnnnnnnnnnnnnnnnnnnnnnnnnnnnnnnnnnnnnnnnnnnnnnnnnnnnnnnnnnnnnnnnnnnnnnnnnnnnnnnnnnnnnnnnnnnnnnnnnnnnnnnnnnnnnnnnnnnnnnnnnnnnnnnnnnnnnnnnnnnnnnnnnnnnnnnnnnnnnnnnnnnnnnnnnnnnnnnnnnnnnnnnnnnnnnnnnnnnnnnnnnnnnnnnnnnnnnnnnnnnnnnnnnnnnnnnnnnnnnnnnnnnnnnnnnnnnnnnnnnnnnnnnnnnnnnnnnnnnnnnnnnnnnnnnnnnnnnnnnnnnnnnnnnnnnnnnnnnnnnnnnnnnnnnnnnnnnnnnnnnnnnnnnnnnnnnnnnnnnnnnnnnnnnnnnnnnnnnnnnnnnnnnnnnnnnnnnnnnnnnnnnnnnnnnnnnnnnnnnnnnnnnnnnnnnnnnnnnnnnnnnnnnnnnnnnnnnnnnnnnnnnnnnnnnnnnnnnnnnnnnnnnnnnnnnnnnnnnnnnnnnnnnnnnnnnnnnnnnnnnnnnnnnnnnnnnnnnnnnnnnnnnnnnnnnnnnnnnnnnnnnnnnnnnnnnnnnnnnnnnnnnnnnnnnnnnnnnnnnnnnnnnnnnnnnnnnnnnnnnnnnnnnnnnnnnnnnnnnnnnnnnnnnnnnnnnnnnnnnnnnnnnnnnnnnnnnnnnnnnnnnnnnnnnnnnnnnnnnnnnnnnnnnnnnnnnnnnnnnnnnnnnnnnnnnnnnnnnnnnnnnnnnnnnnnnnnnnnnnnnnnnnnnnnnnnnnnnnnnnnnnnnnnnnnnnnnnnnnnnnnnnnnnnnnnnnnnnnnnnnnnnnnnnnnnnnnnnnnnnnnnnnnnnnnnnnnnnnnnnnnnnnnnnnnnnnnnnnnnnnnnnnnnnnnnnnnnnnnnnnnnnnnnnnnnnnnnnnnnnnnnnnnnnnnnnnnnnnnnnnnnnnnnnnnnnnnnnnnnnnnnnnnnnnnnnnnnnnnnnnnnnnnnnnnnnnnnnnnnnnnnnnnnnnnnnnnnnnnnnnnnnnnnnnnnnnnnnnnnnnnnnnnnnnnnnnnnnnnnnnnnnnnnnnnnnnnnnnnnnnnnnnnnnnnnnnnnnnnnnnnnnnnnnnnnnnnnnnnnnnnnnnnnnnnnnnnnnnnnnnnnnnnnnnnnnnnnnnnnnnnnnnnnnnnnnnnnnnnnnnnnnnnnnnnnnnnnnnnnnnnnnnnnnnnnnnnnnnnnnnnnnnnnnnnnnnnnnnnnnnnnnnnnnnnnnnnnnnnnnnnnnnnnnnnnnnnnnnnnnnnnnnnnnnnnnnnnnnnnnnnnnnnnnnnnnnnnnnnnnnnnnnnnnnnnnnnnnnnnnnnnnnnnnnnnnnnnnnnnnnnnnnnnnnnnnnnnnnnnnnnnnnnnnnnnnnnnnnnnnnnnnnnnnnnnnnnnnnnnnnnnnnnnnnnnnnnnnnnnnnnnnnnnnnnnnnnnnnnnnnnnnnnnnnnnnnnnnnnnnnnnnnnnnnnnnnnnnnnnnnnnnnnnnnnnnnnnnnnnnnnnnnnnnnnnnnnnnnnnnnnnnnnnnnnnnnnnnnnnnnnnnnnnnnnnnnnnnnnnnnnnnnnnnnnnnnnnnnnnnnnnnnnnnnnnnnnnnnnnnnnnnnnnnnnnnnnnnnnnnnnnnnnnnnnnnnnnnnnnnnnnnnnnnnnnnnnnnnnnnnnnnnnnnnnnnnnnnnnnnnnnnnnnnnnnnnnnnnnnnnnnnnnnnnnnnnnnnnnnnnnnnnnnnnnnnnnnnnnnnnnnnnnnnnnnnnnnnnnnnnnnnnnnnnnnnnnnnnnnnnnnnnnnnnnnnnnnnnnnnnnnnnnnnnnnnnnnnnnnnnnnnnnnnnnnnnnnnnnnnnnnnnnnnnnnnnnnnnnnnnnnnnnnnnnnnnnnnnnnnnnnnnnnnnnnnnnnnnnnnnnnnnnnnnnnnnnnnnnnnnnnnnnnnnnnnnnnnnnnnnnnnnnnnnnnnnnnnnnnnnnnnnnnnnnnnnnnnnnnnnnnnnnnnnnnnnnnnnnnnnnnnnnnnnnnnnnnnnnnnnnnnnnnnnnnnnnnnnnnnnnnnnnnnnnnnnnnnnnnnnnnnnnnnnnnnnnnnnnnnnnnnnnnnnnnnnnnnnnnnnnnnnnnnnnnnnnnnnnnnnnnnnnnnnnnnnnnnnnnnnnnnnnnnnnnnnnnnnnnnnnnnnnnnnnnnnnnnnnnnnnnnnnnnnnnnnnnnnnnnnnnnnnnnnnnnnnnnnnnnnnnnnnnnnnnnnnnnnnnnnnnnnnnnnnnnnnnnnnnnnnnnnnnnnnnnnnnnnnnnnnnnnnnnnnnnnnnnnnnnnnnnnnnnnnnnnnnnnnnnnnnnnnnnnnnnnnnnnnnnnnnnnnnnnnnnnnnnnnnnnnnnnnnnnnnnnnnnnnnnnnnnnnnnnnnnnnnnnnnnnnnnnnnnnnnnnnnnnnnnnnnnnnnnnnnnnnnnnnnnnnnnnnnnnnnnnnnnnnnnnnnnnnnnnnnnnnnnnnnnnnnnnnnnnnnnnnnnnnnnnnnnnnnnnnnnnnnnnnnnnnnnnnnnnnnnnnnnnnnnnnnnnnnnnnnnnnnnnnnnnnnnnnnnnnnnnnnnnnnnnnnnnnnnnnnnnnnnnnnnnnnnnnnnnnnnnnnnnnnnnnnnnnnnnnnnnnnnnnnnnnnnnnnnnnnnnnnnnnnnnnnnnnnnnnnnnnnnnnnnnnnnnnnnnnnnnnnnnnnnnnnnnnnnnnnnnnnnnnnnnnnnnnnnnnnnnnnnnnnnnnnnnnnnnnnnnnnnnnnnnnnnnnnnnnnnnnnnnnnnnnnnnnnnnnnnnnnnnnnnnnnnnnnnnnnnnnnnnnnnnnnnnnnnnnnnnnnnnnnnnnnnnnnnnnnnnnnnnnnnnnnnnnnnnnnnnnnnnnnnnnnnnnnnnnnnnnnnnnnnnnnnnnnnnnnnnnnnnnnnnnnnnnnnnnnnnnnnnnnnnnnnnnnnnnnnnnnnnnnnnnnnnnnnnnnnnnnnnnnnnnnnnnnnnnnnnnnnnnnnnnnnnnnnnnnnnnnnnnnnnnnnnnnnnnnnnnnnnnnnnnnnnnnnnnnnnnnnnnnnnnnnnnnnnnnnnnnnnnnnnnnnnnnnnnnnnnnnnnnnnnnnnnnnnnnnnnnnnnnnnnnnnnnnnnnnnnnnnnnnnnnnnnnnnnnnnnnnnnnnnnnnnnnnnnnnnnnnnnnnnnnnnnnnnnnnnnnnnnnnnnnnnnnnnnnnnnnnnnnnnnnnnnnnnnnnnnnnnnnnnnnnnnnnnnnnnnnnnnnnnnnnnnnnnnnnnnnnnnnnnnnnnnnnnnnnnnnnnnnnnnnnnnnnnnnnnnnnnnnnnnnnnnnnnnnnnnnnnnnnnnnnnnnnnnnnnnnnnnnnnnnnnnnnnnnnnnnnnnnnnnnnnnnnnnnnnnnnnnnnnnnnnnnnnnnnnnnnnnnnnnnnnnnnnnnnnnnnnnnnnnnnnnnnnnnnnnnnnnnnnnnnnnnnnnnnnnnnnnnnnnnnnnnnnnnnnnnnnnnnnnnnnnnnnnnnnnnnnnnnnnnnnnnnnnnnnnnnnnnnnnnnnnnnnnnnnnnnnnnnnnnnnnnnnnnnnnnnnnnnnnnnnnnnnnnnnnnnnnnnnnnnnnnnnnnnnnnnnnnnnnnnnnnnnnnnnnnnnnnnnnnnnnnnnnnnnnnnnnnnnnnnnnnnnnnnnnnnnnnnnnnnnnnnnnnnnnnnnnnnnnnnnnnnnnnnnnnnnnnnnnnnnnnnnnnnnnnnnnnnnnnnnnnnnnnnnnnnnnnnnnnnnnnnnnnnnnnnnnnnnnnnnnnnnnnnnnnnnnnnnnnnnnnnnnnnnnnnnnnnnnnnnnnnnnnnnnnnnnnnnnnnnnnnnnnnnnnnnnnnnnnnnnnnnnnnnnnnnnnnnnnnnnnnnnnnnnnnnnnnnnnnnnnnnnnnnnnnnnnnnnnnnnnnnnnnnnnnnnnnnnnnnnnnnnnnnnnnnnnnnnnnnnnnnnnnnnnnnnnnnnnnnnnnnnnnnnnnnnnnnnnnnnnnnnnnnnnnnnnnnnnnnnnnnnnnnnnnnnnnnnnnnnnnnnnnnnnnnnnnnnnnnnnnnnnnnnnnnnnnnnnnnnnnnnnnnnnnnnnnnnnnnnnnnnnnnnnnnnnnnnnnnnnnnnnnnnnnnnnnnnnnnnnnnnnnnnnnnnnnnnnnnnnnnnnnnnnnnnnnnnnnnnnnnnnnnnnnnnnnnnnnnnnnnnnnnnnnnnnnnnnnnnnnnnnnnnnnnnnnnnnnnnnnnnnnnnnnnnnnnnnnnnnnnnnnnnnnnnnnnnnnnnnnnnnnnnnnnnnnnnnnnnnnnnnnnnnnnnnnnnnnnnnnnnnnnnnnnnnnnnnnnnnnnnnnnnnnnnnnnnnnnnnnnnnnnnnnnnnnnnnnnnnnnnnnnnnnnnnnnnnnnnnnnnnnnnnnnnnnnnnnnnnnnnnnnnnnnnnnnnnnnnnnnnnnnnnnnnnnnnnnnnnnnnnnnnnnnnnnnnnnnnnnnnnnnnnnnnnnnnnnnnnnnnnnnnnnnnnnnnnnnnnnnnnnnnnnnnnnnnnnnnnnnnnnnnnnnnnnnnnnnnnnnnnnnnnnnnnnnnnnnnnnnnnnnnnnnnnnnnnnnnnnnnnnnnnnnnnnnnnnnnnnnnnnnnnnnnnnnnnnnnnnnnnnnnnnnnnnnnnnnnnnnnnnnnnnnnnnnnnnnnnnnnnnnnnnnnnnnnnnnnnnnnnnnnnnnnnnnnnnnnnnnnnnnnnnnnnnnnnnnnnnnnnnnnnnnnnnnnnnnnnnnnnnnnnnnnnnnnnnnnnnnnnnnnnnnnnnnnnnnnnnnnnnnnnnnnnnnnnnnnnnnnnnnnnnnnnnnnnnnnnnnnnnnnnnnnnnnnnnnnnnnnnnnnnnnnnnnnnnnnnnnnnnnnnnnnnnnnnnnnnnnnnnnnnnnnnnnnnnnnnnnnnnnnnnnnnnnnnnnnnnnnnnnnnnnnnnnnnnnnnnnnnnnnnnnnnnnnnnnnnnnnnnnnnnnnnnnnnnnnnnnnnnnnnnnnnnnnnnnnnnnnnnnnnnnnnnnnnnnnnnnnnnnnnnnnnnnnnnnnnnnnnnnnnnnnnnnnnnnnnnnnnnnnnnnnnnnnnnnnnnnnnnnnnnnnnnnnnnnnnnnnnnnnnnnnnnnnnnnnnnnnnnnnnnnnnnnnnnnnnnnnnnnnnnnnnnnnnnnnnnnnnnnnnnnnnnnnnnnnnnnnnnnnnnnnnnnnnnnnnnnnnnnnnnnnnnnnnnnnnnnnnnnnnnnnnnnnnnnnnnnnnnnnnnnnnnnnnnnnnnnnnnnnnnnnnnnnnnnnnnnnnnnnnnnnnnnnnnnnnnnnnnnnnnnnnnnnnnnnnnnnnnnnnnnnnnnnnnnnnnnnnnnnnnnnnnnnnnnnnnnnnnnnnnnnnnnnnnnnnnnnnnnnnnnnnnnnnnnnnnnnnnnnnnnnnnnnnnnnnnnnnnnnnnnnnnnnnnnnnnnnnnnnnnnnnnnnnnnnnnnnnnnnnnnnnnnnnnnnnnnnnnnnnnnnnnnnnnnnnnnnnnnnnnnnnnnnnnnnnnnnnnnnnnnnnnnnnnnnnnnnnnnnnnnnnnnnnnnnnnnnnnnnnnnnnnnnnnnnnnnnnnnnnnnnnnnnnnnnnnnnnnnnnnnnnnnnnnnnnnnnnnnnnnnnnnnnnnnnnnnnnnnnnnnnnnnnnnnnnnnnnnnnnnnnnnnnnnnnnnnnnnnnnnnnnnnnnnnnnnnnnnnnnnnnnnnnnnnnnnnnnnnnnnnnnnnnnnnnnnnnnnnnnnnnnnnnnnnnnnnnnnnnnnnnnnnnnnnnnnnnnnnnnnnnnnnnnnnnnnnnnnnnnnnnnnnnnnnnnnnnnnnnnnnnnnnnnnnnnnnnnnnnnnnnnnnnnnnnnnnnnnnnnnnnnnnnnnnnnnnnnnnnnnnnnnnnnnnnnnnnnnnnnnnnnnnnnnnnnnnnnnnnnnnnnnnnnnnnnnnnnnnnnnnnnnnnnnnnnnnnnnnnnnnnnnnnnnnnnnnnnnnnnnnnnnnnnnnnnnnnnnnnnnnnnnnnnnnnnnnnnnnnnnnnnnnnnnnnnnnnnnnnnnnnnnnnnnnnnnnnnnnnnnnnnnnnnnnnnnnnnnnnnnnnnnnnnnnnnnnnnnnnnnnnnnnnnnnnnnnnnnnnnnnnnnnnnnnnnnnnnnnnnnnnnnnnnnnnnnnnnnnnnnnnnnnnnnnnnnnnnnnnnnnnnnnnnnnnnnnnnnnnnnnnnnnnnnnnnnnnnnnnnnnnnnnnnnnnnnnnnnnnnnnnnnnnnnnnnnnnnnnnnnnnnnnnnnnnnnnnnnnnnnnnnnnnnnnnnnnnnnnnnnnnnnnnnnnnnnnnnnnnnnnnnnnnnnnnnnnnnnnnnnnnnnnnnnnnnnnnnnnnnnnnnnnnnnnnnnnnnnnnnnnnnnnnnnnnnnnnnnnnnnnnnnnnnnnnnnnnnnnnnnnnnnnnnnnnnnnnnnnnnnnnnnnnnnnnnnnnnnnnnnnnnnnnnnnnnnnnnnnnnnnnnnnnnnnnnnnnnnnnnnnnnnnnnnnnnnnnnnnnnnnnnnnnnnnnnnnnnnnnnnnnnnnnnnnnnnnnnnnnnnnnnnnnnnnnnnnnnnnnnnnnnnnnnnnnnnnnnnnnnnnnnnnnnnnnnnnnnnnnnnnnnnnnnnnnnnnnnnnnnnnnnnnnnnnnnnnnnnnnnnnnnnnnnnnnnnnnnnnnnnnnnnnnnnnnnnnnnnnnnnnnnnnnnnnnnnnnnnnnnnnnnnnnnnnnnnnnnnnnnnnnnnnnnnnnnnnnnnnnnnnnnnnnnnnnnnnnnnnnnnnnnnnnnnnnnnnnnnnnnnnnnnnnnnnnnnnnnnnnnnnnnnnnnnnnnnnnnnnnnnnnnnnnnnnnnnnnnnnnnnnnnnnnnnnnnnnnnnnnnnnnnnnnnnnnnnnnnnnnnnnnnnnnnnnnnnnnnnnnnnnnnnnnnnnnnnnnnnnnnnnnnnnnnnnnnnnnnnnnnnnnnnnnnnnnnnnnnnnnnnnnnnnnnnnnnnnnnnnnnnnnnnnnnnnnnnnnnnnnnnnnnnnnnnnnnnnnnnnnnnnnnnnnnnnnnnnnnnnnnnnnnnnnnnnnnnnnnnnnnnnnnnnnnnnnnnnnnnnnnnnnnnnnnnnnnnnnnnnnnnnnnnnnnnnnnnnnnnnnnnnnnnnnnnnnnnnnnnnnnnnnnnnnnnnnnnnnnnnnnnnnnnnnnnnnnnnnnnnnnnnnnnnnnnnnnnnnnnnnnnnnnnnnnnnnnnnnnnnnnnnnnnnnnnnnnnnnnnnnnnnnnnnnnnnnnnnnnnnnnnnnnnnnnnnnnnnnnnnnnnnnnnnnnnnnnnnnnnnnnnnnnnnnnnnnnnnnnnnnnnnnnnnnnnnnnnnnnnnnnnnnnnnnnnnnnnnnnnnnnnnnnnnnnnnnnnnnnnnnnnnnnnnnnnnnnnnnnnnnnnnnnnnnnnnnnnnnnnnnnnnnnnnnnnnnnnnnnnnnnnnnnnnnnnnnnnnnnnnnnnnnnnnnnnnnnnnnnnnnnnnnnnnnnnnnnnnnnnnnnnnnnnnnnnnnnnnnnnnnnnnnnnnnnnnnnnnnnnnnnnnnnnnnnnnnnnnnnnnnnnnnnnnnnnnnnnnnnnnnnnnnnnnnnnnnnnnnnnnnnnnnnnnnnnnnnnnnnnnnnnnnnnnnnnnnnnnnnnnnnnnnnnnnnnnnnnnnnnnnnnnnnnnnnnnnnnnnnnnnnnnnnnnnnnnnnnnnnnnnnnnnnnnnnnnnnnnnnnnnnnnnnnnnnnnnnnnnnnnnnnnnnnnnnnnnnnnnnnnnnnnnnnnnnnnnnnnnnnnnnnnnnnnnnnnnnnnnnnnnnnnnnnnnnnnnnnnnnnnnnnnnnnnnnnnnnnnnnnnnnnnnnnnnnnnnnnnnnnnnnnnnnnnnnnnnnnnnnnnnnnnnnnnnnnnnnnnnnnnnnnnnnnnnnnnnnnnnnnnnnnnnnnnnnnnnnnnnnnnnnnnnnnnnnnnnnnnnnnnnnnnnnnnnnnnnnnnnnnnnnnnnnnnnnnnnnnnnnnnnnnnnnnnnnnnnnnnnnnnnnnnnnnnnnnnnnnnnnnnnnnnnnnnnnnnnnnnnnnnnnnnnnnnnnnnnnnnnnnnnnnnnnnnnnnnnnnnnnnnnnnnnnnnnnnnnnnnnnnnnnnnnnnnnnnnnnnnnnnnnnnnnnnnnnnnnnnnnnnnnnnnnnnnnnnnnnnnnnnnnnnnnnnnnnnnnnnnnnnnnnnnnnnnnnnnnnnnnnnnnnnnnnnnnnnnnnnnnnnnnnnnnnnnnnnnnnnnnnnnnnnnnnnnnnnnnnnnnnnnnnnnnnnnnnnnnnnnnnnnnnnnnnnnnnnnnnnnnnnnnnnnnnnnnnnnnnnnnnnnnnnnnnnnnnnnnnnnnnnnnnnnnnnnnnnnnnnnnnnnnnnnnnnnnnnnnnnnnnnnnnnnnnnnnnnnnnnnnnnnnnnnnnnnnnnnnnnnnnnnnnnnnnnnnnnnnnnnnnnnnnnnnnnnnnnnnnnnnnnnnnnnnnnnnnnnnnnnnnnnnnnnnnnnnnnnnnnnnnnnnnnnnnnnnnnnnnnnnnnnnnnnnnnnnnnnnnnnnnnnnnnnnnnnnnnnnnnnnnnnnnnnnnnnnnnnnnnnnnnnnnnnnnnnnnnnnnnnnnnnnnnnnnnnnnnnnnnnnnnnnnnnnnnnnnnnnnnnnnnnnnnnnnnnnnnnnnnnnnnnnnnnnnnnnnnnnnnnnnnnnnnnnnnnnnnnnnnnnnnnnnnnnnnnnnnnnnnnnnnnnnnnnnnnnnnnnnnnnnnnnnnnnnnnnnnnnnnnnnnnnnnnnnnnnnnnnnnnnnnnnnnnnnnnnnnnnnnnnnnnnnnnnnnnnnnnnnnnnnnnnnnnnnnnnnnnnnnnnnnnnnnnnnnnnnnnnnnnnnnnnnnnnnnnnnnnnnnnnnnnnnnnnnnnnnnnnnnnnnnnnnnnnnnnnnnnnnnnnnnnnnnnnnnnnnnnnnnnnnnnnnnnnnnnnnnnnnnnnnnnnnnnnnnnnnnnnnnnnnnnnnnnnnnnnnnnnnnnnnnnnnnnnnnnnnnnnnnnnnnnnnnnnnnnnnnnnnnnnnnnnnnnnnnnnnnnnnnnnnnnnnnnnnnnnnnnnnnnnnnnnnnnnnnnnnnnnnnnnnnnnnnnnnnnnnnnnnnnnnnnnnnnnnnnnnnnnnnnnnnnnnnnnnnnnnnnnnnnnnnnnnnnnnnnnnnnnnnnnnnnnnnnnnnnnnnnnnnnnnnnnnnnnnnnnnnnnnnnnnnnnnnnnnnnnnnnnnnnnnnnnnnnnnnnnnnnnnnnnnnnnnnnnnnnnnnnnnnnnnnnnnnnnnnnnnnnnnnnnnnnnnnnnnnnnnnnnnnnnnnnnnnnnnnnnnnnnnnnnnnnnnnnnnnnnnnnnnnnnnnnnnnnnnnnnnnnnnnnnnnnnnnnnnnnnnnnnnnnnnnnnnnnnnnnnnnnnnnnnnnnnnnnnnnnnnnnnnnnnnnnnnnnnnnnnnnnnnnnnnnnnnnnnnnnnnnnnnnnnnnnnnnnnnnnnnnnnnnnnnnnnnnnnnnnnnnnnnnnnnnnnnnnnnnnnnnnnnnnnnnnnnnnnnnnnnnnnnnnnnnnnnnnnnnnnnnnnnnnnnnnnnnnnnnnnnnnnnnnnnnnnnnnnnnnnnnnnnnnnnnnnnnnnnnnnnnnnnnnnnnnnnnnnnnnnnnnnnnnnnnnnnnnnnnnnnnnnnnnnnnnnnnnnnnnnnnnnnnnnnnnnnnnnnnnnnnnnnnnnnnnnnnnnnnnnnnnnnnnnnnnnnnnnnnnnnnnnnnnnnnnnnnnnnnnnnnnnnnnnnnnnnnnnnnnnnnnnnnnnnnnnnnnnnnnnnnnnnnnnnnnnnnnnnnnnnnnnnnnnnnnnnnnnnnnnnnnnnnnnnnnnnnnnnnnnnnnnnnnnnnnnnnnnnnnnnnnnnnnnnnnnnnnnnnnnnnnnnnnnnnnnnnnnnnnnnnnnnnnnnnnnnnnnnnnnnnnnnnnnnnnnnnnnnnnnnnnnnnnnnnnnnnnnnnnnnnnnnnnnnnnnnnnnnnnnnnnnnnnnnnnnnnnnnnnnnnnnnnnnnnnnnnnnnnnnnnnnnnnnnnnnnnnnnnnnnnnnnnnnnnnnnnnnnnnnnnnnnnnnnnnnnnnnnnnnnnnnnnnnnnnnnnnnnnnnnnnnnnnnnnnnnnnnnnnnnnnnnnnnnnnnnnnnnnnnnnnnnnnnnnnnnnnnnnnnnnnnnnnnnnnnnnnnnnnnnnnnnnnnnnnnnnnnnnnnnnnnnnnnnnnnnnnnnnnnnnnnnnnnnnnnnnnnnnnnnnnnnnnnnnnnnnnnnnnnnnnnnnnnnnnnnnnnnnnnnnnnnnnnnnnnnnnnnnnnnnnnnnnnnnnnnnnnnnnnnnnnnnnnnnnnnnnnnnnnnnnnnnnnnnnnnnnnnnnnnnnnnnnnnnnnnnnnnnnnnnnnnnnnnnnnnnnnnnnnnnnnnnnnnnnnnnnnnnnnnnnnnnnnnnnnnnnnnnnnnnnnnnnnnnnnnnnnnnnnnnnnnnnnnnnnnnnnnnnnnnnnnnnnnnnnnnnnnnnnnnnnnnnnnnnnnnnnnnnnnnnnnnnnnnnnnnnnnnnnnnnnnnnnnnnnnnnnnnnnnnnnnnnnnnnnnnnnnnnnnnnnnnnnnnnnnnnnnnnnnnnnnnnnnnnnnnnnnnnnnnnnnnnnnnnnnnnnnnnnnnnnnnnnnnnnnnnnnnnnnnnnnnnnnnnnnnnnnnnnnnnnnnnnnnnnnnnnnnnnnnnnnnnnnnnnnnnnnnnnnnnnnnnnnnnnnnnnnnnnnnnnnnnnnnnnnnnnnnnnnnnnnnnnnnnnnnnnnnnnnnnnnnnnnnnnnnnnnnnnnnnnnnnnnnnnnnnnnnnnnnnnnnnnnnnnnnnnnnnnnnnnnnnnnnnnnnnnnnnnnnnnnnnnnnnnnnnnnnnnnnnnnnnnnnnnnnnnnnnnnnnnnnnnnnnnnnnnnnnnnnnnnnnnnnnnnnnnnnnnnnnnnnnnnnnnnnnnnnnnnnnnnnnnnnnnnnnnnnnnnnnnnnnnnnnnnnnnnnnnnnnnnnnnnnnnnnnnnnnnnnnnnnnnnnnnnnnnnnnnnnnnnnnnnnnnnnnnnnnnnnnnnnnnnnnnnnnnnnnnnnnnnnnnnnnnnnnnnnnnnnnnnnnnnnnnnnnnnnnnnnnnnnnnnnnnnnnnnnnnnnnnnnnnnnnnnnnnnnnnnnnnnnnnnnnnnnnnnnnnnnnnnnnnnnnnnnnnnnnnnnnnnnnnnnnnnnnnnnnnnnnnnnnnnnnnnnnnnnnnnnnnnnnnnnnnnnnnnnnnnnnnnnnnnnnnnnnnnnnnnnnnnnnnnnnnnnnnnnnnnnnnnnnnnnnnnnnnnnnnnnnnnnnnnnnnnnnnnnnnnnnnnnnnnnnnnnnnnnnnnnnnnnnnnnnnnnnnnnnnnnnnnnnnnnnnnnnnnnnnnnnnnnnnnnnnnnnnnnnnnnnnnnnnnnnnnnnnnnnnnnnnnnnnnnnnnnnnnnnnnnnnnnnnnnnnnnnnnnnnnnnnnnnnnnnnnnnnnnnnnnnnnnnnnnnnnnnnnnnnnnnnnnnnnnnnnnnnnnnnnnnnnnnnnnnnnnnnnnnnnnnnnnnnnnnnnnnnnnnnnnnnnnnnnnnnnnnnnnnnnnnnnnnnnnnnnnnnnnnnnnnnnnnnnnnnnnnnnnnnnnnnnnnnnnnnnnnnnnnnnnnnnnnnnnnnnnnnnnnnnnnnnnnnnnnnnnnnnnnnnnnnnnnnnnnnnnnnnnnnnnnnnnnnnnnnnnnnnnnnnnnnnnnnnnnnnnnnnnnnnnnnnnnnnnnnnnnnnnnnnnnnnnnnnnnnnnnnnnnnnnnnnnnnnnnnnnnnnnnnnnnnnnnnnnnnnnnnnnnnnnnnnnnnnnnnnnnnnnnnnnnnnnnnnnnnnnnnnnnnnnnnnnnnnnnnnnnnnnnnnnnnnnnnnnnnnnnnnnnnnnnnnnnnnnnnnnnnnnnnnnnnnnnnnnnnnnnnnnnnnnnnnnnnnnnnnnnnnnnnnnnnnnnnnnnnnnnnnnnnnnnnnnnnnnnnnnnnnnnnnnnnnnnnnnnnnnnnnnnnnnnnnnnnnnnnnnnnnnnnnnnnnnnnnnnnnnnnnnnnnnnnnnnnnnnnnnnnnnnnnnnnnnnnnnnnnnnnnnnnnnnnnnnnnnnnnnnnnnnnnnnnnnnnnnnnnnnnnnnnnnnnnnnnnnnnnnnnnnnnnnnnnnnnnnnnnnnnnnnnnnnnnnnnnnnnnnnnnnnnnnnnnnnnnnnnnnnnnnnnnnnnnnnnnnnnnnnnnnnnnnnnnnnnnnnnnnnnnnnnnnnnnnnnnnnnnnnnnnnnnnnnnnnnnnnnnnnnnnnnnnnnnnnnnnnnnnnnnnnnnnnnnnnnnnnnnnnnnnnnnnnnnnnnnnnnnnnnnnnnnnnnnnnnnnnnnnnnnnnnnnnnnnnnnnnnnnnnnnnnnnnnnnnnnnnnnnnnnnnnnnnnnnnnnnnnnnnnnnnnnnnnnnnnnnnnnnnnnnnnnnnnnnnnnnnnnnnnnnnnnnnnnnnnnnnnnnnnnnnnnnnnnnnnnnnnnnnnnnnnnnnnnnnnnnnnnnnnnnnnnnnnnnnnnnnnnnnnnnnnnnnnnnnnnnnnnnnnnnnnnnnnnnnnnnnnnnnnnnnnnnnnnnnnnnnnnnnnnnnnnnnnnnnnnnnnnnnnnnnnnnnnnnnnnnnnnnnnnnnnnnnnnnnnnnnnnnnnnnnnnnnnnnnnnnnnnnnnnnnnnnnnnnnnnnnnnnnnnnnnnnnnnnnnnnnnnnnnnnnnnnnnnnnnnnnnnnnnnnnnnnnnnnnnnnnnnnnnnnnnnnnnnnnnnnnnnnnnnnnnnnnnnnnnnnnnnnnnnnnnnnnnnnnnnnnnnnnnnnnnnnnnnnnnnnnnnnnnnnnnnnnnnnnnnnnnnnnnnnnnnnnnnnnnnnnnnnnnnnnnnnnnnnnnnnnnnnnnnnnnnnnnnnnnnnnnnnnnnnnnnnnnnnnnnnnnnnnnnnnnnnnnnnnnnnnnnnnnnnnnnnnnnnnnnnnnnnnnnnnnnnnnnnnnnnnnnnnnnnnnnnnnnnnnnnnnnnnnnnnnnnnnnnnnnnnnnnnnnnnnnnnnnnnnnnnnnnnnnnnnnnnnnnnnnnnnnnnnnnnnnnnnnnnnnnnnnnnnnnnnnnnnnnnnnnnnnnnnnnnnnnnnnnnnnnnnnnnnnnnnnnnnnnnnnnnnnnnnnnnnnnnnnnnnnnnnnnnnnnnnnnnnnnnnnnnnnnnnnnnnnnnnnnnnnnnnnnnnnnnnnnnnnnnnnnnnnnnnnnnnnnnnnnnnnnnnnnnnnnnnnnnnnnnnnnnnnnnnnnnnnnnnnnnnnnnnnnnnnnnnnnnnnnnnnnnnnnnnnnnnnnnnnnnnnnnnnnnnnnnnnnnnnnnnnnnnnnnnnnnnnnnnnnnnnnnnnnnnnnnnnnnnnnnnnnnnnnnnnnnnnnnnnnnnnnnnnnnnnnnnnnnnnnnnnnnnnnnnnnnnnnnnnnnnnnnnnnnnnnnnnnnnnnnnnnnnnnnnnnnnnnnnnnnnnnnnnnnnnnnnnnnnnnnnnnnnnnnnnnnnnnnnnnnnnnnnnnnnnnnnnnnnnnnnnnnnnnnnnnnnnnnnnnnnnnnnnnnnnnnnnnnnnnnnnnnnnnnnnnnnnnnnnnnnnnnnnnnnnnnnnnnnnnnnnnnnnnnnnnnnnnnnnnnnnnnnnnnnnnnnnnnnnnnnnnnnnnnnnnnnnnnnnnnnnnnnnnnnnnnnnnnnnnnnnnnnnnnnnnnnnnnnnnnnnnnnnnnnnnnnnnnnnnnnnnnnnnnnnnnnnnnnnnnnnnnnnnnnnnnnnnnnnnnnnnnnnnnnnnnnnnnnnnnnnnnnnnnnnnnnnnnnnnnnnnnnnnnnnnnnnnnnnnnnnnnnnnnnnnnnnnnnnnnnnnnnnnnnnnnnnnnnnnnnnnnnnnnnnnnnnnnnnnnnnnnnnnnnnnnnnnnnnnnnnnnnnnnnnnnnnnnnnnnnnnnnnnnnnnnnnnnnnnnnnnnnnnnnnnnnnnnnnnnnnnnnnnnnnnnnnnnnnnnnnnnnnnnnnnnnnnnnnnnnnnnnnnnnnnnnnnnnnnnnnnnnnnnnnnnnnnnnnnnnnnnnnnnnnnnnnnnnnnnnnnnnnnnnnnnnnnnnnnnnnnnnnnnnnnnnnnnnnnnnnnnnnnnnnnnnnnnnnnnnnnnnnnnnnnnnnnnnnnnnnnnnnnnnnnnnnnnnnnnnnnnnnnnnnnnnnnnnnnnnnnnnnnnnnnnnnnnnnnnnnnnnnnnnnnnnnnnnnnnnnnnnnnnnnnnnnnnnnnnnnnnnnnnnnnnnnnnnnnnnnnnnnnnnnnnnnnnnnnnnnnnnnnnnnnnnnnnnnnnnnnnnnnnnnnnnnnnnnnnnnnnnnnnnnnnnnnnnnnnnnnnnnnnnnnnnnnnnnnnnnnnnnnnnnnnnnnnnnnnnnnnnnnnnnnnnnnnnnnnnnnnnnnnnnnnnnnnnnnnnnnnnnnnnnnnnnnnnnnnnnnnnnnnnnnnnnnnnnnnnnnnnnnnnnnnnnnnnnnnnnnnnnnnnnnnnnnnnnnnnnnnnnnnnnnnnnnnnnnnnnnnnnnnnnnnnnnnnnnnnnnnnnnnnnnnnnnnnnnnnnnnnnnnnnnnnnnnnnnnnnnnnnnnnnnnnnnnnnnnnnnnnnnnnnnnnnnnnnnnnnnnnnnnnnnnnnnnnnnnnnnnnnnnnnnnnnnnnnnnnnnnnnnnnnnnnnnnnnnnnnnnnnnnnnnnnnnnnnnnnnnnnnnnnnnnnnnnnnnnnnnnnnnnnnnnnnnnnnnnnnnnnnnnnnnnnnnnnnnnnnnnnnnnnnnnnnnnnnnnnnnnnnnnnnnnnnnnnnnnnnnnnnnnnnnnnnnnnnnnnnnnnnnnnnnnnnnnnnnnnnnnnnnnnnnnnnnnnnnnnnnnnnnnnnnnnnnnnnnnnnnnnnnnnnnnnnnnnnnnnnnnnnnnnnnnnnnnnnnnnnnnnnnnnnnnnnnnnnnnnnnnnnnnnnnnnnnnnnnnnnnnnnnnnnnnnnnnnnnnnnnnnnnnnnnnnnnnnnnnnnnnnnnnnnnnnnnnnnnnnnnnnnnnnnnnnnnnnnnnnnnnnnnnnnnnnnnnnnnnnnnnnnnnnnnnnnnnnnnnnnnnnnnnnnnnnnnnnnnnnnnnnnnnnnnnnnnnnnnnnnnnnnnnnnnnnnnnnnnnnnnnnnnnnnnnnnnnnnnnnnnnnnnnnnnnnnnnnnnnnnnnnnnnnnnnnnnnnnnnnnnnnnnnnnnnnnnnnnnnnnnnnnnnnnnnnnnnnnnnnnnnnnnnnnnnnnnnnnnnnnnnnnnnnnnnnnnnnnnnnnnnnnnnnnnnnnnnnnnnnnnnnnnnnnnnnnnnnnnnnnnnnnnnnnnnnnnnnnnnnnnnnnnnnnnnnnnnnnnnnnnnnnnnnnnnnnnnnnnnnnnnnnnnnnnnnnnnnnnnnnnnnnnnnnnnnnnnnnnnnnnnnnnnnnnnnnnnnnnnnnnnnnnnnnnnnnnnnnnnnnnnnnnnnnnnnnnnnnnnnnnnnnnnnnnnnnnnnnnnnnnnnnnnnnnnnnnnnnnnnnnnnnnnnnnnnnnnnnnnnnnnnnnnnnnnnnnnnnnnnnnnnnnnnnnnnnnnnnnnnnnnnnnnnnnnnnnnnnnnnnnnnnnnnnnnnnnnnnnnnnnnnnnnnnnnnnnnnnnnnnnnnnnnnnnnnnnnnnnnnnnnnnnnnnnnnnnnnnnnnnnnnnnnnnnnnnnnnnnnnnnnnnnnnnnnnnnnnnnnnnnnnnnnnnnnnnnnnnnnnnnnnnnnnnnnnnnnnnnnnnnnnnnnnnnnnnnnnnnnnnnnnnnnnnnnnnnnnnnnnnnnnnnnnnnnnnnnnnnnnnnnnnnnnnnnnnnnnnnnnnnnnnnnnnnnnnnnnnnnnnnnnnnnnnnnnnnnnnnnnnnnnnnnnnnnnnnnnnnnnnnnnnnnnnnnnnnnnnnnnnnnnnnnnnnnnnnnnnnnnnnnnnnnnnnnnnnnnnnnnnnnnnnnnnnnnnnnnnnnnnnnnnnnnnnnnnnnnnnnnnnnnnnnnnnnnnnnnnnnnnnnnnnnnnnnnnnnnnnnnnnnnnnnnnnnnnnnnnnnnnnnnnnnnnnnnnnnnnnnnnnnnnnnnnnnnnnnnnnnnnnnnnnnnnnnnnnnnnnnnnnnnnnnnnnnnnnnnnnnnnnnnnnnnnnnnnnnnnnnnnnnnnnnnnnnnnnnnnnnnnnnnnnnnnnnnnnnnnnnnnnnnnnnnnnnnnnnnnnnnnnnnnnnnnnnnnnnnnnnnnnnnnnnnnnnnnnnnnnnnnnnnnnnnnnnnnnnnnnnnnnnnnnnnnnnnnnnnnnnnnnnnnnnnnnnnnnnnnnnnnnnnnnnnnnnnnnnnnnnnnnnnnnnnnnnnnnnnnnnnnnnnnnnnnnnnnnnnnnnnnnnnnnnnnnnnnnnnnnnnnnnnnnnnnnnnnnnnnnnnnnnnnnnnnnnnnnnnnnnnnnnnnnnnnnnnnnnnnnnnnnnnnnnnnnnnnnnnnnnnnnnnnnnnnnnnnnnnnnnnnnnnnnnnnnnnnnnnnnnnnnnnnnnnnnnnnnnnnnnnnnnnnnnnnnnnnnnnnnnnnnnnnnnnnnnnnnnnnnnnnnnnnnnnnnnnnnnnnnnnnnnnnnnnnnnnnnnnnnnnnnnnnnnnnnnnnnnnnnnnnnnnnnnnnnnnnnnnnnnnnnnnnnnnnnnnnnnnnnnnnnnnnnnnnnnnnnnnnnnnnnnnnnnnnnnnnnnnnnnnnnnnnnnnnnnnnnnnnnnnnnnnnnnnnnnnnnnnnnnnnnnnnnnnnnnnnnnnnnnnnnnnnnnnnnnnnnnnnnnnnnnnnnnnnnnnnnnnnnnnnnnnnnnnnnnnnnnnnnnnnnnnnnnnnnnnnnnnnnnnnnnnnnnnnnnnnnnnnnnnnnnnnnnnnnnnnnnnnnnnnnnnnnnnnnnnnnnnnnnnnnnnnnnnnnnnnnnnnnnnnnnnnnnnnnnnnnnnnnnnnnnnnnnnnnnnnnnnnnnnnnnnnnnnnnnnnnnnnnnnnnnnnnnnnnnnnnnnnnnnnnnnnnnnnnnnnnnnnnnnnnnnnnnnnnnnnnnnnnnnnnnnnnnnnnnnnnnnnnnnnnnnnnnnnnnnnnnnnnnnnnnnnnnnnnnnnnnnnnnnnnnnnnnnnnnnnnnnnnnnnnnnnnnnnnnnnnnnnnnnnnnnnnnnnnnnnnnnnnnnnnnnnnnnnnnnnnnnnnnnnnnnnnnnnnnnnnnnnnnnnnnnnnnnnnnnnnnnnnnnnnnnnnnnnnnnnnnnnnnnnnnnnnnnnnnnnnnnnnnnnnnnnnnnnnnnnnnnnnnnnnnnnnnnnnnnnnnnnnnnnnnnnnnnnnnnnnnnnnnnnnnnnnnnnnnnnnnnnnnnnnnnnnnnnnnnnnnnnnnnnnnnnnnnnnnnnnnnnnnnnnnnnnnnnnnnnnnnnnnnnnnnnnnnnnnnnnnnnnnnnnnnnnnnnnnnnnnnnnnnnnnnnnnnnnnnnnnnnnnnnnnnnnnnnnnnnnnnnnnnnnnnnnnnnnnnnnnnnnnnnnnnnnnnnnnnnnnnnnnnnnnnnnnnnnnnnnnnnnnnnnnnnnnnnnnnnnnnnnnnnnnnnnnnnnnnnnnnnnnnnnnnnnnnnnnnnnnnnnnnnnnnnnnnnnnnnnnnnnnnnnnnnnnnnnnnnnnnnnnnnnnnnnnnnnnnnnnnnnnnnnnnnnnnnnnnnnnnnnnnnnnnnnnnnnnnnnnnnnnnnnnnnnnnnnnnnnnnnnnnnnnnnnnnnnnnnnnnnnnnnnnnnnnnnnnnnnnnnnnnnnnnnnnnnnnnnnnnnnnnnnnnnnnnnnnnnnnnnnnnnnnnnnnnnnnnnnnnnnnnnnnnnnnnnnnnnnnnnnnnnnnnnnnnnnnnnnnnnnnnnnnnnnnnnnnnnnnnnnnnnnnnnnnnnnnnnnnnnnnnnnnnnnnnnnnnnnnnnnnnnnnnnnnnnnnnnnnnnnnnnnnnnnnnnnnnnnnnnnnnnnnnnnnnnnnnnnnnnnnnnnnnnnnnnnnnnnnnnnnnnnnnnnnnnnnnnnnnnnnnnnnnnnnnnnnnnnnnnnnnnnnnnnnnnnnnnnnnnnnnnnnnnnnnnnnnnnnnnnnnnnnnnnnnnnnnnnnnnnnnnnnnnnnnnnnnnnnnnnnnnnnnnnnnnnnnnnnnnnnnnnnnnnnnnnnnnnnnnnnnnnnnnnnnnnnnnnnnnnnnnnnnnnnnnnnnnnnnnnnnnnnnnnnnnnnnnnnnnnnnnnnnnnnnnnnnnnnnnnnnnnnnnnnnnnnnnnnnnnnnnnnnnnnnnnnnnnnnnnnnnnnnnnnnnnnnnnnnnnnnnnnnnnnnnnnnnnnnnnnnnnnnnnnnnnnnnnnnnnnnnnnnnnnnnnnnnnnnnnnnnnnnnnnnnnnnnnnnnnnnnnnnnnnnnnnnnnnnnnnnnnnnnnnnnnnnnnnnnnnnnnnnnnnnnnnnnnnnnnnnnnnnnnnnnnnnnnnnnnnnnnnnnnnnnnnnnnnnnnnnnnnnnnnnnnnnnnnnnnnnnnnnnnnnnnnnnnnnnnnnnnnnnnnnnnnnnnnnnnnnnnnnnnnnnnnnnnnnnnnnnnnnnnnnnnnnnnnnnnnnnnnnnnnnnnnnnnnnnnnnnnnnnnnnnnnnnnnnnnnnnnnnnnnnnnnnnnnnnnnnnnnnnnnnnnnnnnnnnnnnnnnnnnnnnnnnnnnnnnnnnnnnnnnnnnnnnnnnnnnnnnnnnnnnnnnnnnnnnnnnnnnnnnnnnnnnnnnnnnnnnnnnnnnnnnnnnnnnnnnnnnnnnnnnnnnnnnnnnnnnnnnnnnnnnnnnnnnnnnnnnnnnnnnnnnnnnnnnnnnnnnnnnnnnnnnnnnnnnnnnnnnnnnnnnnnnnnnnnnnnnnnnnnnnnnnnnnnnnnnnnnnnnnnnnnnnnnnnnnnnnnnnnnnnnnnnnnnnnnnnnnnnnnnnnnnnnnnnnnnnnnnnnnnnnnnnnnnnnnnnnnnnnnnnnnnnnnnnnnnnnnnnnnnnnnnnnnnnnnnnnnnnnnnnnnnnnnnnnnnnnnnnnnnnnnnnnnnnnnnnnnnnnnnnnnnnnnnnnnnnnnnnnnnnnnnnnnnnnnnnnnnnnnnnnnnnnnnnnnnnnnnnnnnnnnnnnnnnnnnnnnnnnnnnnnnnnnnnnnnnnnnnnnnnnnnnnnnnnnnnnnnnnnnnnnnnnnnnnnnnnnnnnnnnnnnnnnnnnnnnnnnnnnnnnnnnnnnnnnnnnnnnnnnnnnnnnnnnnnnnnnnnnnnnnnnnnnnnnnnnnnnnnnnnnnnnnnnnnnnnnnnnnnnnnnnnnnnnnnnnnnnnnnnnnnnnnnnnnnnnnnnnnnnnnnnnnnnnnnnnnnnnnnnnnnnnnnnnnnnnnnnnnnnnnnnnnnnnnnnnnnnnnnnnnnnnnnnnnnnnnnnnnnnnnnnnnnnnnnnnnnnnnnnnnnnnnnnnnnnnnnnnnnnnnnnnnnnnnnnnnnnnnnnnnnnnnnnnnnnnnnnnnnnnnnnnnnnnnnnnnnnnnnnnnnnnnnnnnnnnnnnnnnnnnnnnnnnnnnnnnnnnnnnnnnnnnnnnnnnnnnnnnnnnnnnnnnnnnnnnnnnnnnnnnnnnnnnnnnnnnnnnnnnnnnnnnnnnnnnnnnnnnnnnnnnnnnnnnnnnnnnnnnnnnnnnnnnnnnnnnnnnnnnnnnnnnnnnnnnnnnnnnnnnnnnnnnnnnnnnnnnnnnnnnnnnnnnnnnnnnnnnnnnnnnnnnnnnnnnnnnnnnnnnnnnnnnnnnnnnnnnnnnnnnnnnnnnnnnnnnnnnnnnnnnnnnnnnnnnnnnnnnnnnnnnnnnnnnnnnnnnnnnnnnnnnnnnnnnnnnnnnnnnnnnnnnnnnnnnnnnnnnnnnnnnnnnnnnnnnnnnnnnnnnnnnnnnnnnnnnnnnnnnnnnnnnnnnnnnnnnnnnnnnnnnnnnnnnnnnnnnnnnnnnnnnnnnnnnnnnnnnnnnnnnnnnnnnnnnnnnnnnnnnnnnnnnnnnnnnnnnnnnnnnnnnnnnnnnnnnnnnnnnnnnnnnnnnnnnnnnnnnnnnnnnnnnnnnnnnnnnnnnnnnnnnnnnnnnnnnnnnnnnnnnnnnnnnnnnnnnnnnnnnnnnnnnnnnnnnnnnnnnnnnnnnnnnnnnnnnnnnnnnnnnnnnnnnnnnnnnnnnnnnnnnnnnnnnnnnnnnnnnnnnnnnnnnnnnnnnnnnnnnnnnnnnnnnnnnnnnnnnnnnnnnnnnnnnnnnnnnnnnnnnnnnnnnnnnnnnnnnnnnnnnnnnnnnnnnnnnnnnnnnnnnnnnnnnnnnnnnnnnnnnnnnnnnnnnnnnnnnnnnnnnnnnnnnnnnnnnnnnnnnnnnnnnnnnnnnnnnnnnnnnnnnnnnnnnnnnnnnnnnnnnnnnnnnnnnnnnnnnnnnnnnnnnnnnnnnnnnnnnnnnnnnnnnnnnnnnnnnnnnnnnnnnnnnnnnnnnnnnnnnnnnnnnnnnnnnnnnnnnnnnnnnnnnnnnnnnnnnnnnnnnnnnnnnnnnnnnnnnnnnnnnnnnnnnnnnnnnnnnnnnnnnnnnnnnnnnnnnnnnnnnnnnnnnnnnnnnnnnnnnnnnnnnnnnnnnnnnnnnnnnnnnnnnnnnnnnnnnnnnnnnnnnnnnnnnnnnnnnnnnnnnnnnnnnnnnnnnnnnnnnnnnnnnnnnnnnnnnnnnnnnnnnnnnnnnnnnnnnnnnnnnnnnnnnnnnnnnnnnnnnnnnnnnnnnnnnnnnnnnnnnnnnnnnnnnnnnnnnnnnnnnnnnnnnnnnnnnnnnnnnnnnnnnnnnnnnnnnnnnnnnnnnnnnnnnnnnnnnnnnnnnnnnnnnnnnnnnnnnnnnnnnnnnnnnnnnnnnnnnnnnnnnnnnnnnnnnnnnnnnnnnnnnnnnnnnnnnnnnnnnnnnnnnnnnnnnnnnnnnnnnnnnnnnnnnnnnnnnnnnnnnnnnnnnnnnnnnnnnnnnnnnnnnnnnnnnnnnnnnnnnnnnnnnnnnnnnnnnnnnnnnnnnnnnnnnnnnnnnnnnnnnnnnnnnnnnnnnnnnnnnnnnnnnnnnnnnnnnnnnnnnnnnnnnnnnnnnnnnnnnnnnnnnnnnnnnnnnnnnnnnnnnnnnnnnnnnnnnnnnnnnnnnnnnnnnnnnnnnnnnnnnnnnnnnnnnnnnnnnnnnnnnnnnnnnnnnnnnnnnnnnnnnnnnnnnnnnnnnnnnnnnnnnnnnnnnnnnnnnnnnnnnnnnnnnnnnnnnnnnnnnnnnnnnnnnnnnnnnnnnnnnnnnnnnnnnnnnnnnnnnnnnnnnnnnnnnnnnnnnnnnnnnnnnnnnnnnnnnnnnnnnnnnnnnnnnnnnnnnnnnnnnnnnnnnnnnnnnnnnnnnnnnnnnnnnnnnnnnnnnnnnnnnnnnnnnnnnnnnnnnnnnnnnnnnnnnnnnnnnnnnnnnnnnnnnnnnnnnnnnnnnnnnnnnnnnnnnnnnnnnnnnnnnnnnnnnnnnnnnnnnnnnnnnnnnnnnnnnnnnnnnnnnnnnnnnnnnnnnnnnnnnnnnnnnnnnnnnnnnnnnnnnnnnnnnnnnnnnnnnnnnnnnnnnnnnnnnnnnnnnnnnnnnnnnnnnnnnnnnnnnnnnnnnnnnnnnnnnnnnnnnnnnnnnnnnnnnnnnnnnnnnnnnnnnnnnnnnnnnnnnnnnnnnnnnnnnnnnnnnnnnnnnnnnnnnnnnnnnnnnnnnnnnnnnnnnnnnnnnnnnnnnnnnnnnnnnnnnnnnnnnnnnnnnnnnnnnnnnnnnnnnnnnnnnnnnnnnnnnnnnnnnnnnnnnnnnnnnnnnnnnnnnnnnnnnnnnnnnnnnnnnnnnnnnnnnnnnnnnnnnnnnnnnnnnnnnnnnnnnnnnnnnnnnnnnnnnnnnnnnnnnnnnnnnnnnnnnnnnnnnnnnnnnnnnnnnnnnnnnnnnnnnnnnnnnnnnnnnnnnnnnnnnnnnnnnnnnnnnnnnnnnnnnnnnnnnnnnnnnnnnnnnnnnnnnnnnnnnnnnnnnnnnnnnnnnnnnnnnnnnnnnnnnnnnnnnnnnnnnnnnnnnnnnnnnnnnnnnnnnnnnnnnnnnnnnnnnnnnnnnnnnnnnnnnnnnnnnnnnnnnnnnnnnnnnnnnnnnnnnnnnnnnnnnnnnnnnnnnnnnnnnnnnnnnnnnnnnnnnnnnnnnnnnnnnnnnnnnnnnnnnnnnnnnnnnnnnnnnnnnnnnnnnnnnnnnnnnnnnnnnnnnnnnnnnnnnnnnnnnnnnnnnnnnnnnnnnnnnnnnnnnnnnnnnnnnnnnnnnnnnnnnnnnnnnnnnnnnnnnnnnnnnnnnnnnnnnnnnnnnnnnnnnnnnnnnnnnnnnnnnnnnnnnnnnnnnnnnnnnnnnnnnnnnnnnnnnnnnnnnnnnnnnnnnnnnnnnnnnnnnnnnnnnnnnnnnnnnnnnnnnnnnnnnnnnnnnnnnnnnnnnnnnnnnnnnnnnnnnnnnnnnnnnnnnnnnnnnnnnnnnnnnnnnnnnnnnnnnnnnnnnnnnnnnnnnnnnnnnnnnnnnnnnnnnnnnnnnnnnnnnnnnnnnnnnnnnnnnnnnnnnnnnnnnnnnnnnnnnnnnnnnnnnnnnnnnnnnnnnnnnnnnnnnnnnnnnnnnnnnnnnnnnnnnnnnnnnnnnnnnnnnnnnnnnnnnnnnnnnnnnnnnnnnnnnnnnnnnnnnnnnnnnnnnnnnnnnnnnnnnnnnnnnnnnnnnnnnnnnnnnnnnnnnnnnnnnnnnnnnnnnnnnnnnnnnnnnnnnnnnnnnnnnnnnnnnnnnnnnnnnnnnnnnnnnnnnnnnnnnnnnnnnnnnnnnnnnnnnnnnnnnnnnnnnnnnnnnnnnnnnnnnnnnnnnnnnnnnnnnnnnnnnnnnnnnnnnnnnnnnnnnnnnnnnnnnnnnnnnnnnnnnnnnnnnnnnnnnnnnnnnnnnnnnnnnnnnnnnnnnnnnnnnnnnnnnnnnnnnnnnnnnnnnnnnnnnnnnnnnnnnnnnnnnnnnnnnnnnnnnnnnnnnnnnnnnnnnnnnnnnnnnnnnnnnnnnnnnnnnnnnnnnnnnnnnnnnnnnnnnnnnnnnnnnnnnnnnnnnnnnnnnnnnnnnnnnnnnnnnnnnnnnnnnnnnnnnnnnnnnnnnnnnnnnnnnnnnnnnnnnnnnnnnnnnnnnnnnnnnnnnnnnnnnnnnnnnnnnnnnnnnnnnnnnnnnnnnnnnnnnnnnnnnnnnnnnnnnnnnnnnnnnnnnnnnnnnnnnnnnnnnnnnnnnnnnnnnnnnnnnnnnnnnnnnnnnnnnnnnnnnnnnnnnnnnnnnnnnnnnnnnnnnnnnnnnnnnnnnnnnnnnnnnnnnnnnnnnnnnnnnnnnnnnnnnnnnnnnnnnnnnnnnnnnnnnnnnnnnnnnnnnnnnnnnnnnnnnnnnnnnnnnnnnnnnnnnnnnnnnnnnnnnnnnnnnnnnnnnnnnnnnnnnnnnnnnnnnnnnnnnnnnnnnnnnnnnnnnnnnnnnnnnnnnnnnnnnnnnnnnnnnnnnnnnnnnnnnnnnnnnnnnnnnnnnnnnnnnnnnnnnnnnnnnnnnnnnnnnnnnnnnnnnnnnnnnnnnnnnnnnnnnnnnnnnnnnnnnnnnnnnnnnnnnnnnnnnnnnnnnnnnnnnnnnnnnnnnnnnnnnnnnnnnnnnnnnnnnnnnnnnnnnnnnnnnnnnnnnnnnnnnnnnnnnnnnnnnnnnnnnnnnnnnnnnnnnnnnnnnnnnnnnnnnnnnnnnnnnnnnnnnnnnnnnnnnnnnnnnnnnnnnnnnnnnnnnnnnnnnnnnnnnnnnnnnnnnnnnnnnnnnnnnnnnnnnnnnnnnnnnnnnnnnnnnnnnnnnnnnnnnnnnnnnnnnnnnnnnnnnnnnnnnnnnnnnnnnnnnnnnnnnnnnnnnnnnnnnnnnnnnnnnnnnnnnnnnnnnnnnnnnnnnnnnnnnnnnnnnnnnnnnnnnnnnnnnnnnnnnnnnnnnnnnnnnnnnnnnnnnnnnnnnnnnnnnnnnnnnnnnnnnnnnnnnnnnnnnnnnnnnnnnnnnnnnnnnnnnnnnnnnnnnnnnnnnnnnnnnnnnnnnnnnnnnnnnnnnnnnnnnnnnnnnnnnnnnnnnnnnnnnnnnnnnnnnnnnnnnnnnnnnnnnnnnnnnnnnnnnnnnnnnnnnnnnnnnnnnnnnnnnnnnnnnnnnnnnnnnnnnnnnnnnnnnnnnnnnnnnnnnnnnnnnnnnnnnnnnnnnnnnnnnnnnnnnnnnnnnnnnnnnnnnnnnnnnnnnnnnnnnnnnnnnnnnnnnnnnnnnnnnnnnnnnnnnnnnnnnnnnnnnnnnnnnnnnnnnnnnnnnnnnnnnnnnnnnnnnnnnnnnnnnnnnnnnnnnnnnnnnnnnnnnnnnnnnnnnnnnnnnnnnnnnnnnnnnnnnnnnnnnnnnnnnnnnnnnnnnnnnnnnnnnnnnnnnnnnnnnnnnnnnnnnnnnnnnnnnnnnnnnnnnnnnnnnnnnnnnnnnnnnnnnnnnnnnnnnnnnnnnnnnnnnnnnnnnnnnnnnnnnnnnnnnnnnnnnnnnnnnnnnnnnnnnnnnnnnnnnnnnnnnnnnnnnnnnnnnnnnnnnnnnnnnnnnnnnnnnnnnnnnnnnnnnnnnnnnnnnnnnnnnnnnnnnnnnnnnnnnnnnnnnnnnnnnnnnnnnnnnnnnnnnnnnnnnnnnnnnnnnnnnnnnnnnnnnnnnnnnnnnnnnnnnnnnnnnnnnnnnnnnnnnnnnnnnnnnnnnnnnnnnnnnnnnnnnnnnnnnnnnnnnnnnnnnnnnnnnnnnnnnnnnnnnnnnnnnnnnnnnnnnnnnnnnnnnnnnnnnnnnnnnnnnnnnnnnnnnnnnnnnnnnnnnnnnnnnnnnnnnnnnnnnnnnnnnnnnnnnnnnnnnnnnnnnnnnnnnnnnnnnnnnnnnnnnnnnnnnnnnnnnnnnnnnnnnnnnnnnnnnnnnnnnnnnnnnnnnnnnnnnnnnnnnnnnnnnnnnnnnnnnnnnnnnnnnnnnnnnnnnnnnnnnnnnnnnnnnnnnnnnnnnnnnnnnnnnnnnnnnnnnnnnnnnnnnnnnnnnnnnnnnnnnnnnnnnnnnnnnnnnnnnnnnnnnnnnnnnnnnnnnnnnnnnnnnnnnnnnnnnnnnnnnnnnnnnnnnnnnnnnnnnnnnnnnnnnnnnnnnnnnnnnnnnnnnnnnnnnnnnnnnnnnnnnnnnnnnnnnnnnnnnnnnnnnnnnnnnnnnnnnnnnnnnnnnnnnnnnnnnnnnnnnnnnnnnnnnnnnnnnnnnnnnnnnnnnnnnnnnnnnnnnnnnnnnnnnnnnnnnnnnnnnnnnnnnnnnnnnnnnnnnnnnnnnnnnnnnnnnnnnnnnnnnnnnnnnnnnnnnnnnnnnnnnnnnnnnnnnnnnnnnnnnnnnnnnnnnnnnnnnnnnnnnnnnnnnnnnnnnnnnnnnnnnnnnnnnnnnnnnnnnnnnnnnnnnnnnnnnnnnnnnnnnnnnnnnnnnnnnnnnnnnnnnnnnnnnnnnnnnnnnnnnnnnnnnnnnnnnnnnnnnnnnnnnnnnnnnnnnnnnnnnnnnnnnnnnnnnnnnnnnnnnnnnnnnnnnnnnnnnnnnnnnnnnnnnnnnnnnnnnnnnnnnnnnnnnnnnnnnnnnnnnnnnnnnnnnnnnnnnnnnnnnnnnnnnnnnnnnnnnnnnnnnnnnnnnnnnnnnnnnnnnnnnnnnnnnnnnnnnnnnnnnnnnnnnnnnnnnnnnnnnnnnnnnnnnnnnnnnnnnnnnnnnnnnnnnnnnnnnnnnnnnnnnnnnnnnnnnnnnnnnnnnnnnnnnnnnnnnnnnnnnnnnnnnnnnnnnnnnnnnnnnnnnnnnnnnnnnnnnnnnnnnnnnnnnnnnnnnnnnnnnnnnnnnnnnnnnnnnnnnnnnnnnnnnnnnnnnnnnnnnnnnnnnnnnnnnnnnnnnnnnnnnnnnnnnnnnnnnnnnnnnnnnnnnnnnnnnnnnnnnnnnnnnnnnnnnnnnnnnnnnnnnnnnnnnnnnnnnnnnnnnnnnnnnnnnnnnnnnnnnnnnnnnnnnnnnnnnnnnnnnnnnnnnnnnnnnnnnnnnnnnnnnnnnnnnnnnnnnnnnnnnnnnnnnnnnnnnnnnnnnnnnnnnnnnnnnnnnnnnnnnnnnnnnnnnnnnnnnnnnnnnnnnnnnnnnnnnnnnnnnnnnnnnnnnnnnnnnnnnnnnnnnnnnnnnnnnnnnnnnnnnnnnnnnnnnnnnnnnnnnnnnnnnnnnnnnnnnnnnnnnnnnnnnnnnnnnnnnnnnnnnnnnnnnnnnnnnnnnnnnnnnnnnnnnnnnnnnnnnnnnnnnnnnnnnnnnnnnnnnnnnnnnnnnnnnnnnnnnnnnnnnnnnnnnnnnnnnnnnnnnnnnnnnnnnnnnnnnnnnnnnnnnnnnnnnnnnnnnnnnnnnnnnnnnnnnnnnnnnnnnnnnnnnnnnnnnnnnnnnnnnnnnnnnnnnnnnnnnnnnnnnnnnnnnnnnnnnnnnnnnnnnnnnnnnnnnnnnnnnnnnnnnnnnnnnnnnnnnnnnnnnnnnnnnnnnnnnnnnnnnnnnnnnnnnnnnnnnnnnnnnnnnnnnnnnnnnnnnnnnnnnnnnnnnnnnnnnnnnnnnnnnnnnnnnnnnnnnnnnnnnnnnnnnnnnnnnnnnnnnnnnnnnnnnnnnnnnnnnnnnnnnnnnnnnnnnnnnnnnnnnnnnnnnnnnnnnnnnnnnnnnnnnnnnnnnnnnnnnnnnnnnnnnnnnnnnnnnnnnnnnnnnnnnnnnnnnnnnnnnnnnnnnnnnnnnnnnnnnnnnnnnnnnnnnnnnnnnnnnnnnnnnnnnnnnnnnnnnnnnnnnnnnnnnnnnnnnnnnnnnnnnnnnnnnnnnnnnnnnnnnnnnnnnnnnnnnnnnnnnnnnnnnnnnnnnnnnnnnnnnnnnnnnnnnnnnnnnnnnnnnnnnnnnnnnnnnnnnnnnnnnnnnnnnnnnnnnnnnnnnnnnnnnnnnnnnnnnnnnnnnnnnnnnnnnnnnnnnnnnnnnnnnnnnnnnnnnnnnnnnnnnnnnnnnnnnnnnnnnnnnnnnnnnnnnnnnnnnnnnnnnnnnnnnnnnnnnnnnnnnnnnnnnnnnnnnnnnnnnnnnnnnnnnnnnnnnnnnnnnnnnnnnnnnnnnnnnnnnnnnnnnnnnnnnnnnnnnnnnnnnnnnnnnnnnnnnnnnnnnnnnnnnnnnnnnnnnnnnnnnnnnnnnnnnnnnnnnnnnnnnnnnnnnnnnnnnnnnnnnnnnnnnnnnnnnnnnnnnnnnnnnnnnnnnnnnnnnnnnnnnnnnnnnnnnnnnnnnnnnnnnnnnnnnnnnnnnnnnnnnnnnnnnnnnnnnnnnnnnnnnnnnnnnnnnnnnnnnnnnnnnnnnnnnnnnnnnnnnnnnnnnnnnnnnnnnnnnnnnnnnnnnnnnnnnnnnnnnnnnnnnnnnnnnnnnnnnnnnnnnnnnnnnnnnnnnnnnnnnnnnnnnnnnnnnnnnnnnnnnnnnnnnnnnnnnnnnnnnnnnnnnnnnnnnnnnnnnnnnnnnnnnnnnnnnnnnnnnnnnnnnnnnnnnnnnnnnnnnnnnnnnnnnnnnnnnnnnnnnnnnnnnnnnnnnnnnnnnnnnnnnnnnnnnnnnnnnnnnnnnnnnnnnnnnnnnnnnnnnnnnnnnnnnnnnnnnnnnnnnnnnnnnnnnnnnnnnnnnnnnnnnnnnnnnnnnnnnnnnnnnnnnnnnnnnnnnnnnnnnnnnnnnnnnnnnnnnnnnnnnnnnnnnnnnnnnnnnnnnnnnnnnnnnnnnnnnnnnnnnnnnnnnnnnnnnnnnnnnnnnnnnnnnnnnnnnnnnnnnnnnnnnnnnnnnnnnnnnnnnnnnnnnnnnnnnnnnnnnnnnnnnnnnnnnnnnnnnnnnnnnnnnnnnnnnnnnnnnnnnnnnnnnnnnnnnnnnnnnnnnnnnnnnnnnnnnnnnnnnnnnnnnnnnnnnnnnnnnnnnnnnnnnnnnnnnnnnnnnnnnnnnnnnnnnnnnnnnnnnnnnnnnnnnnnnnnnnnnnnnnnnnnnnnnnnnnnnnnnnnnnnnnnnnnnnnnnnnnnnnnnnnnnnnnnnnnnnnnnnnnnnnnnnnnnnnnnnnnnnnnnnnnnnnnnnnnnnnnnnnnnnnnnnnnnnnnnnnnnnnnnnnnnnnnnnnnnnnnnnnnnnnnnnnnnnnnnnnnnnnnnnnnnnnnnnnnnnnnnnnnnnnnnnnnnnnnnnnnnnnnnnnnnnnnnnnnnnnnnnnnnnnnnnnnnnnnnnnnnnnnnnnnnnnnnnnnnnnnnnnnnnnnnnnnnnnnnnnnnnnnnnnnnnnnnnnnnnnnnnnnnnnnnnnnnnnnnnnnnnnnnnnnnnnnnnnnnnnnnnnnnnnnnnnnnnnnnnnnnnnnnnnnnnnnnnnnnnnnnnnnnnnnnnnnnnnnnnnnnnnnnnnnnnnnnnnnnnnnnnnnnnnnnnnnnnnnnnnnnnnnnnnnnnnnnnnnnnnnnnnnnnnnnnnnnnnnnnnnnnnnnnnnnnnnnnnnnnnnnnnnnnnnnnnnnnnnnnnnnnnnnnnnnnnnnnnnnnnnnnnnnnnnnnnnnnnnnnnnnnnnnnnnnnnnnnnnnnnnnnnnnnnnnnnnnnnnnnnnnnnnnnnnnnnnnnnnnnnnnnnnnnnnnnnnnnnnnnnnnnnnnnnnnnnnnnnnnnnnnnnnnnnnnnnnnnnnnnnnnnnnnnnnnnnnnnnnnnnnnnnnnnnnnnnnnnnnnnnnnnnnnnnnnnnnnnnnnnnnnnnnnnnnnnnnnnnnnnnnnnnnnnnnnnnnnnnnnnnnnnnnnnnnnnnnnnnnnnnnnnnnnnnnnnnnnnnnnnnnnnnnnnnnnnnnnnnnnnnnnnnnnnnnnnnnnnnnnnnnnnnnnnnnnnnnnnnnnnnnnnnnnnnnnnnnnnnnnnnnnnnnnnnnnnnnnnnnnnnnnnnnnnnnnnnnnnnnnnnnnnnnnnnnnnnnnnnnnnnnnnnnnnnnnnnnnnnnnnnnnnnnnnnnnnnnnnnnnnnnnnnnnnnnnnnnnnnnnnnnnnnnnnnnnnnnnnnnnnnnnnnnnnnnnnnnnnnnnnnnnnnnnnnnnnnnnnnnnnnnnnnnnnnnnnnnnnnnnnnnnnnnnnnnnnnnnnnnnnnnnnnnnnnnnnnnnnnnnnnnnnnnnnnnnnnnnnnnnnnnnnnnnnnnnnnnnnnnnnnnnnnnnnnnnnnnnnnnnnnnnnnnnnnnnnnnnnnnnnnnnnnnnnnnnnnnnnnnnnnnnnnnnnnnnnnnnnnnnnnnnnnnnnnnnnnnnnnnnnnnnnnnnnnnnnnnnnnnnnnnnnnnnnnnnnnnnnnnnnnnnnnnnnnnnnnnnnnnnnnnnnnnnnnnnnnnnnnnnnnnnnnnnnnnnnnnnnnnnnnnnnnnnnnnnnnnnnnnnnnnnnnnnnnnnnnnnnnnnnnnnnnnnnnnnnnnnnnnnnnnnnnnnnnnnnnnnnnnnnnnnnnnnnnnnnnnnnnnnnnnnnnnnnnnnnnnnnnnnnnnnnnnnnnnnnnnnnnnnnnnnnnnnnnnnnnnnnnnnnnnnnnnnnnnnnnnnnnnnnnnnnnnnnnnnnnnnnnnnnnnnnnnnnnnnnnnnnnnnnnnnnnnnnnnnnnnnnnnnnnnnnnnnnnnnnnnnnnnnnnnnnnnnnnnnnnnnnnnnnnnnnnnnnnnnnnnnnnnnnnnnnnnnnnnnnnnnnnnnnnnnnnnnnnnnnnnnnnnnnnnnnnnnnnnnnnnnnnnnnnnnnnnnnnnnnnnnnnnnnnnnnnnnnnnnnnnnnnnnnnnnnnnnnnnnnnnnnnnnnnnnnnnnnnnnnnnnnnnnnnnnnnnnnnnnnnnnnnnnnnnnnnnnnnnnnnnnnnnnnnnnnnnnnnnnnnnnnnnnnnnnnnnnnnnnnnnnnnnnnnnnnnnnnnnnnnnnnnnnnnnnnnnnnnnnnnnnnnnnnnnnnnnnnnnnnnnnnnnnnnnnnnnnnnnnnnnnnnnnnnnnnnnnnnnnnnnnnnnnnnnnnnnnnnnnnnnnnnnnnnnnnnnnnnnnnnnnnnnnnnnnnnnnnnnnnnnnnnnnnnnnnnnnnnnnnnnnnnnnnnnnnnnnnnnnnnnnnnnnnnnnnnnnnnnnnnnnnnnnnnnnnnnnnnnnnnnnnnnnnnnnnnnnnnnnnnnnnnnnnnnnnnnnnnnnnnnnnnnnnnnnnnnnnnnnnnnnnnnnnnnnnnnnnnnnnnnnnnnnnnnnnnnnnnnnnnnnnnnnnnnnnnnnnnnnnnnnnnnnnnnnnnnnnnnnnnnnnnnnnnnnnnnnnnnnnnnnnnnnnnnnnnnnnnnnnnnnnnnnnnnnnnnnnnnnnnnnnnnnnnnnnnnnnnnnnnnnnnnnnnnnnnnnnnnnnnnnnnnnnnnnnnnnnnnnnnnnnnnnnnnnnnnnnnnnnnnnnnnnnnnnnnnnnnnnnnnnnnnnnnnnnnnnnnnnnnnnnnnnnnnnnnnnnnnnnnnnnnnnnnnnnnnnnnnnnnnnnnnnnnnnnnnnnnnnnnnnnnnnnnnnnnnnnnnnnnnnnnnnnnnnnnnnnnnnnnnnnnnnnnnnnnnnnnnnnnnnnnnnnnnnnnnnnnnnnnnnnnnnnnnnnnnnnnnnnnnnnnnnnnnnnnnnnnnnnnnnnnnnnnnnnnnnnnnnnnnnnnnnnnnnnnnnnnnnnnnnnnnnnnnnnnnnnnnnnnnnnnnnnnnnnnnnnnnnnnnnnnnnnnnnnnnnnnnnnnnnnnnnnnnnnnnnnnnnnnnnnnnnnnnnnnnnnnnnnnnnnnnnnnnnnnnnnnnnnnnnnnnnnnnnnnnnnnnnnnnnnnnnnnnnnnnnnnnnnnnnnnnnnnnnnnnnnnnnnnnnnnnnnnnnnnnnnnnnnnnnnnnnnnnnnnnnnnnnnnnnnnnnnnnnnnnnnnnnnnnnnnnnnnnnnnnnnnnnnnnnnnnnnnnnnnnnnnnnnnnnnnnnnnnnnnnnnnnnnnnnnnnnnnnnnnnnnnnnnnnnnnnnnnnnnnnnnnnnnnnnnnnnnnnnnnnnnnnnnnnnnnnnnnnnnnnnnnnnnnnnnnnnnnnnnnnnnnnnnnnnnnnnnnnnnnnnnnnnnnnnnnnnnnnnnnnnnnnnnnnnnnnnnnnnnnnnnnnnnnnnnnnnnnnnnnnnnnnnnnnnnnnnnnnnnnnnnnnnnnnnnnnnnnnnnnnnnnnnnnnnnnnnnnnnnnnnnnnnnnnnnnnnnnnnnnnnnnnnnnnnnnnnnnnnnnnnnnnnnnnnnnnnnnnnnnnnnnnnnnnnnnnnnnnnnnnnnnnnnnnnnnnnnnnnnnnnnnnnnnnnnnnnnnnnnnnnnnnnnnnnnnnnnnnnnnnnnnnnnnnnnnnnnnnnnnnnnnnnnnnnnnnnnnnnnnnnnnnnnnnnnnnnnnnnnnnnnnnnnnnnnnnnnnnnnnnnnnnnnnnnnnnnnnnnnnnnnnnnnnnnnnnnnnnnnnnnnnnnnnnnnnnnnnnnnnnnnnnnnnnnnnnnnnnnnnnnnnnnnnnnnnnnnnnnnnnnnnnnnnnnnnnnnnnnnnnnnnnnnnnnnnnnnnnnnnnnnnnnnnnnnnnnnnnnnnnnnnnnnnnnnnnnnnnnnnnnnnnnnnnnnnnnnnnnnnnnnnnnnnnnnnnnnnnnnnnnnnnnnnnnnnnnnnnnnnnnnnnnnnnnnnnnnnnnnnnnnnnnnnnnnnnnnnnnnnnnnnnnnnnnnnnnnnnnnnnnnnnnnnnnnnnnnnnnnnnnnnnnnnnnnnnnnnnnnnnnnnnnnnnnnnnnnnnnnnnnnnnnnnnnnnnnnnnnnnnnnnnnnnnnnnnnnnnnnnnnnnnnnnnnnnnnnnnnnnnnnnnnnnnnnnnnnnnnnnnnnnnnnnnnnnnnnnnnnnnnnnnnnnnnnnnnnnnnnnnnnnnnnnnnnnnnnnnnnnnnnnnnnnnnnnnnnnnnnnnnnnnnnnnnnnnnnnnnnnnnnnnnnnnnnnnnnnnnnnnnnnnnnnnnnnnnnnnnnnnnnnnnnnnnnnnnnnnnnnnnnnnnnnnnnnnnnnnnnnnnnnnnnnnnnnnnnnnnnnnnnnnnnnnnnnnnnnnnnnnnnnnnnnnnnnnnnnnnnnnnnnnnnnnnnnnnnnnnnnnnnnnnnnnnnnnnnnnnnnnnnnnnnnnnnnnnnnnnnnnnnnnnnnnnnnnnnnnnnnnnnnnnnnnnnnnnnnnnnnnnnnnnnnnnnnnnnnnnnnnnnnnnnnnnnnnnnnnnnnnnnnnnnnnnnnnnnnnnnnnnnnnnnnnnnnnnnnnnnnnnnnnnnnnnnnnnnnnnnnnnnnnnnnnnnnnnnnnnnnnnnnnnnnnnnnnnnnnnnnnnnnnnnnnnnnnnnnnnnnnnnnnnnnnnnnnnnnnnnnnnnnnnnnnnnnnnnnnnnnnnnnnnnnnnnnnnnnnnnnnnnnnnnnnnnnnnnnnnnnnnnnnnnnnnnnnnnnnnnnnnnnnnnnnnnnnnnnnnnnnnnnnnnnnnnnnnnnnnnnnnnnnnnnnnnnnnnnnnnnnnnnnnnnnnnnnnnnnnnnnnnnnnnnnnnnnnnnnnnnnnnnnnnnnnnnnnnnnnnnnnnnnnnnnnnnnnnnnnnnnnnnnnnnnnnnnnnnnnnnnnnnnnnnnnnnnnnnnnnnnnnnnnnnnnnnnnnnnnnnnnnnnnnnnnnnnnnnnnnnnnnnnnnnnnnnnnnnnnnnnnnnnnnnnnnnnnnnnnnnnnnnnnnnnnnnnnnnnnnnnnnnnnnnnnnnnnnnnnnnnnnnnnnnnnnnnnnnnnnnnnnnnnnnnnnnnnnnnnnnnnnnnnnnnnnnnnnnnnnnnnnnnnnnnnnnnnnnnnnnnnnnnnnnnnnnnnnnnnnnnnnnnnnnnnnnnnnnnnnnnnnnnnnnnnnnnnnnnnnnnnnnnnnnnnnnnnnnnnnnnnnnnnnnnnnnnnnnnnnnnnnnnnnnnnnnnnnnnnnnnnnnnnnnnnnnnnnnnnnnnnnnnnnnnnnnnnnnnnnnnnnnnnnnnnnnnnnnnnnnnnnnnnnnnnnnnnnnnnnnnnnnnnnnnnnnnnnnnnnnnnnnnnnnnnnnnnnnnnnnnnnnnnnnnnnnnnnnnnnnnnnnnnnnnnnnnnnnnnnnnnnnnnnnnnnnnnnnnnnnnnnnnnnnnnnnnnnnnnnnnnnnnnnnnnnnnnnnnnnnnnnnnnnnnnnnnnnnnnnnnnnnnnnnnnnnnnnnnnnnnnnnnnnnnnnnnnnnnnnnnnnnnnnnnnnnnnnnnnnnnnnnnnnnnnnnnnnnnnnnnnnnnnnnnnnnnnnnnnnnnnnnnnnnnnnnnnnnnnnnnnnnnnnnnnnnnnnnnnnnnnnnnnnnnnnnnnnnnnnnnnnnnnnnnnnnnnnnnnnnnnnnnnnnnnnnnnnnnnnnnnnnnnnnnnnnnnnnnnnnnnnnnnnnnnnnnnnnnnnnnnnnnnnnnnnnnnnnnnnnnnnnnnnnnnnnnnnnnnnnnnnnnnnnnnnnnnnnnnnnnnnnnnnnnnnnnnnnnnnnnnnnnnnnnnnnnnnnnnnnnnnnnnnnnnnnnnnnnnnnnnnnnnnnnnnnnnnnnnnnnnnnnnnnnnnnnnnnnnnnnnnnnnnnnnnnnnnnnnnnnnnnnnnnnnnnnnnnnnnnnnnnnnnnnnnnnnnnnnnnnnnnnnnnnnnnnnnnnnnnnnnnnnnnnnnnnnnnnnnnnnnnnnnnnnnnnnnnnnnnnnnnnnnnnnnnnnnnnnnnnnnnnnnnnnnnnnnnnnnnnnnnnnnnnnnnnnnnnnnnnnnnnnnnnnnnnnnnnnnnnnnnnnnnnnnnnnnnnnnnnnnnnnnnnnnnnnnnnnnnnnnnnnnnnnnnnnnnnnnnnnnnnnnnnnnnnnnnnnnnnnnnnnnnnnnnnnnnnnnnnnnnnnnnnnnnnnnnnnnnnnnnnnnnnnnnnnnnnnnnnnnnnnnnnnnnnnnnnnnnnnnnnnnnnnnnnnnnnnnnnnnnnnnnnnnnnnnnnnnnnnnnnnnnnnnnnnnnnnnnnnnnnnnnnnnnnnnnnnnnnnnnnnnnnnnnnnnnnnnnnnnnnnnnnnnnnnnnnnnnnnnnnnnnnnnnnnnnnnnnnnnnnnnnnnnnnnnnnnnnnnnnnnnnnnnnnnnnnnnnnnnnnnnnnnnnnnnnnnnnnnnnnnnnnnnnnnnnnnnnnnnnnnnnnnnnnnnnnnnnnnnnnnnnnnnnnnnnnnnnnnnnnnnnnnnnnnnnnnnnnnnnnnnnnnnnnnnnnnnnnnnnnnnnnnnnnnnnnnnnnnnnnnnnnnnnnnnnnnnnnnnnnnnnnnnnnnnnnnnnnnnnnnnnnnnnnnnnnnnnnnnnnnnnnnnnnnnnnnnnnnnnnnnnnnnnnnnnnnnnnnnnnnnnnnnnnnnnnnnnnnnnnnnnnnnnnnnnnnnnnnnnnnnnnnnnnnnnnnnnnnnnnnnnnnnnnnnnnnnnnnnnnnnnnnnnnnnnnnnnnnnnnnnnnnnnnnnnnnnnnnnnnnnnnnnnnnnnnnnnnnnnnnnnnnnnnnnnnnnnnnnnnnnnnnnnnnnnnnnnnnnnnnnnnnnnnnnnnnnnnnnnnnnnnnnnnnnnnnnnnnnnnnnnnnnnnnnnnnnnnnnnnnnnnnnnnnnnnnnnnnnnnnnnnnnnnnnnnnnnnnnnnnnnnnnnnnnnnnnnnnnnnnnnnnnnnnnnnnnnnnnnnnnnnnnnnnnnnnnnnnnnnnnnnnnnnnnnnnnnnnnnnnnnnnnnnnnnnnnnnnnnnnnnnnnnnnnnnnnnnnnnnnnnnnnnnnnnnnnnnnnnnnnnnnnnnnnnnnnnnnnnnnnnnnnnnnnnnnnnnnnnnnnnnnnnnnnnnnnnnnnnnnnnnnnnnnnnnnnnnnnnnnnnnnnnnnnnnnnnnnnnnnnnnnnnnnnnnnnnnnnnnnnnnnnnnnnnnnnnnnnnnnnnnnnnnnnnnnnnnnnnnnnnnnnnnnnnnnnnnnnnnnnnnnnnnnnnnnnnnnnnnnnnnnnnnnnnnnnnnnnnnnnnnnnnnnnnnnnnnnnnnnnnnnnnnnnnnnnnnnnnnnnnnnnnnnnnnnnnnnnnnnnnnnnnnnnnnnnnnnnnnnnnnnnnnnnnnnnnnnnnnnnnnnnnnnnnnnnnnnnnnnnnnnnnnnnnnnnnnnnnnnnnnnnnnnnnnnnnnnnnnnnnnnnnnnnnnnnnnnnnnnnnnnnnnnnnnnnnnnnnnnnnnnnnnnnnnnnnnnnnnnnnnnnnnnnnnnnnnnnnnnnnnnnnnnnnnnnnnnnnnnnnnnnnnnnnnnnnnnnnnnnnnnnnnnnnnnnnnnnnnnnnnnnnnnnnnnnnnnnnnnnnnnnnnnnnnnnnnnnnnnnnnnnnnnnnnnnnnnnnnnnnnnnnnnnnnnnnnnnnnnnnnnnnnnnnnnnnnnnnnnnnnnnnnnnnnnnnnnnnnnnnnnnnnnnnnnnnnnnnnnnnnnnnnnnnnnnnnnnnnnnnnnnnnnnnnnnnnnnnnnnnnnnnnnnnnnnnnnnnnnnnnnnnnnnnnnnnnnnnnnnnnnnnnnnnnnnnnnnnnnnnnnnnnnnnnnnnnnnnnnnnnnnnnnnnnnnnnnnnnnnnnnnnnnnnnnnnnnnnnnnnnnnnnnnnnnnnnnnnnnnnnnnnnnnnnnnnnnnnnnnnnnnnnnnnnnnnnnnnnnnnnnnnnnnnnnnnnnnnnnnnnnnnnnnnnnnnnnnnnnnnnnnnnnnnnnnnnnnnnnnnnnnnnnnnnnnnnnnnnnnnnnnnnnnnnnnnnnnnnnnnnnnnnnnnnnnnnnnnnnnnnnnnnnnnnnnnnnnnnnnnnnnnnnnnnnnnnnnnnnnnnnnnnnnnnnnnnnnnnnnnnnnnnnnnnnnnnnnnnnnnnnnnnnnnnnnnnnnnnnnnnnnnnnnnnnnnnnnnnnnnnnnnnnnnnnnnnnnnnnnnnnnnnnnnnnnnnnnnnnnnnnnnnnnnnnnnnnnnnnnnnnnnnnnnnnnnnnnnnnnnnnnnnnnnnnnnnnnnnnnnnnnnnnnnnnnnnnnnnnnnnnnnnnnnnnnnnnnnnnnnnnnnnnnnnnnnnnnnnnnnnnnnnnnnnnnnnnnnnnnnnnnnnnnnnnnnnnnnnnnnnnnnnnnnnnnnnnnnnnnnnnnnnnnnnnnnnnnnnnnnnnnnnnnnnnnnnnnnnnnnnnnnnnnnnnnnnnnnnnnnnnnnnnnnnnnnnnnnnnnnnnnnnnnnnnnnnnnnnnnnnnnnnnnnnnnnnnnnnnnnnnnnnnnnnnnnnnnnnnnnnnnnnnnnnnnnnnnnnnnnnnnnnnnnnnnnnnnnnnnnnnnnnnnnnnnnnnnnnnnnnnnnnnnnnnnnnnnnnnnnnnnnnnnnnnnnnnnnnnnnnnnnnnnnnnnnnnnnnnnnnnnnnnnnnnnnnnnnnnnnnnnnnnnnnnnnnnnnnnnnnnnnnnnnnnnnnnnnnnnnnnnncccacgattgatactttcgacgccgtgcgagaaacggagtcgcaagccgatcgcaagttgggcccgctgagcccaaggtatactcaagacaagacgtttgaccccaagcatagtgaacagaagatatttgcccgaagaagaatgcagaagagaaagaagtaagagagagagagagaagtagctgataaaagacaaacagagttccttttaccctgtactgcgcaagtgacttcggccaagcctgccgacggaaatccggaggacccgagactacgaccgcgggacgctaagggcacatcaacggcgaaggacagccgtgtgtgaggactccttcaaactcaagtccagttaggtggggaccagcgacggccttgagcttcctggagtgatccacctattccatatcctagttgggtcacttgctgtgctcgtggtagcccatttcatattattccagagggtattctggggtgctaggtagtcgcctccaggattttgtattgactgtttgtgtgaagggaaggtaactgatagtgattgtattttcctcctttattggaggtggtgcgcgtttgtgtgagtctcaggggagctaggcccctgaatttcagactcgagtgagcctagtgtgtgtgacccaccgtccaagggtccaaacgaataagtgacggctagttgtagtgtttgtatactctgtatttgttggttttctcgagctaggagggcatttgggtaaggtttcttctgagttccaagtgccagagttgactgaaatcctggaccctgaattcgtgatattctgggtttcgggggatctgattctctgggtttgccttttggtgtggaggtgcgttctgaagtagacgtgcactcgcgcacttcttcgacgctacatttacaaccggtggagtgccgttccgtcgaagacaaacgagccgacagggattacacaaggtacccacgccaaccaaggagtgtgattcccagggtttaaagcttcgcggctgcgaatctctgggtctatcttcttgctgttgactctcaagtcgattctctgggtctacaccctggggaacagtcttgggctgcgctatacgaacccccctgggcgacaaaggtttcatcgggcctcgcttcagctggtgcgcgtgcccggattcgattgtcgaggatttcgccggattcaagtgttgaagaagtgctgagtgcccgtcagcttcaagctaccaagatgcctggaggacgaggggcgaagaagggtggacgcggtgatggaggacgcggtgaggcgtcacgtcagtcgcgtcgtgttcaaggtatagagcctgaggagcacaaggacctggaaacagtcgtccgcgacgctcggaaggcgaagaaggctgctcgcgagagtgaggcaatgcaaggtggggacgtcgaagcgtctgcagttcaagatcagcctgctgctggatcgcaaactcaggagggagaagtttcccctgcgttccaaggtttgacggaggtgaactctgggtcgcggattcctgaagtcccagaggagcacacccgcgagggtggtgctcaggcgtctgagggaagcgccaatgcggatgagcccccggaggtgattgacttggtctcatcttcggacgagtctgttgtggaagtgaaggcggagcccgtgcgagcgaaggaggaggcgaagactcagagttccaaggtgaattctgggttcgcaccacctgaacccagggtttcagcgccaagttcgcaagcggcacccaggaaaacgcctgaagacgacgtccgggaagcttctgctcctgctccggaatcgggagcagcggcgttggacacggagagcatggtgctgtacgtccgacgtgaagtccgacgctggaaagaagttaaccctgggaaggtgacgctcccaagtgtcgtctatgagtggccgactccgaaaccggaggccaactcgtacttcgcggctgcgtacgcaacgggagactacttcaagtggcgtttgtctctggcgaaccaagacgaagcttggatctctgagttccacctcgcccggtggggtgtcggaactgcccaggatctcatggcgactacgattccccagagtatcatgaccgcacgcgagtgcgtcgccatgctgcagactctgttcttcgaagcgggattcgagtttgtaaacttgatccctggctggtcttcgacgcgtgcttccaggattccagaaaccctggtacgctcggtcatggaggaagtccagaatttcattgcggtggaactggtcgagtggagattggtgatagctggtgtgcctttcaaggtaaactctgaagatcacgccacaccaagcgcccaagatcaagcgccaaaactggnnnnnnnnnnnnnnnnnnnnnnnnnnnnnnnnnnnnnnnnnnnnnnnnnnnnnnnnnnnnnnnnnnnnnnnnnnnnnnnnnnnnnnnnnnnnnnnnnnnnnnnnnnnnnnnnnnnnnnnnnnnnnnnnnnnnnnnnnnnnnnnnnnnnnnnnnnnnnnnnnnnnnnnnnnnnnnnnnnnnnnnnnnnnnnnnnnnnnnnnnnnnnnnnnnnnnnnnnnnnnnnnnnnnnnnnnnnnnnnnnnnnnnnnnnnnnnnnnnnnnnnnnnnnnnnnnnnnnnnnnnnnnnnnnnnnnnnnnnnnnnnnnnnnnnnnnnnnnnnnnnnnnnnnnnnnnnnnnnnnnnnnnnnnnnnnnnnnnnnnnnnnnnnnnnnnnnnnnnnnnnnnnnnnnnnnnnnnnnnnnnnnnnnnnnnnnnnnnnnnnnnnnnnnnnnnnnnnnnnnnnnnnnnnnnnnnnnnnnnnnnnnnnnnnnnnnnnnnnnnnnnnnnnnnnnnnnnnnnnnnnnnnnnnnnnnnnnnnnnnnnnnnnnnnnnnnnnnnnnnnnnnnnnnnnnnnnnnnnnnnnnnnnnnnnnnnnnnnnnnnnnnnnnnnnnnnnnnnnnnnnnnnnnnnnnnnnnnnnnnnnnnnnnnnnnnnnnnnnnnnnnnnnnnnnnnnnnnnnnnnnnnnnnnnnnnnnnnnnnnnnnnnnnnnnnnnnnnnnnnnnnnnnnnnnnnnnnnnnnnnnnnnnnnnnnnnnnnnnnnnnnnnnnnnnnnnnnnnnnnnnnnnnnnnnnnnnnnnnnnnnnnnnnnnnnnnnnnnnnnnnnnnnnnnnnnnnnnnnnnnnnnnnnnnnnnnnnnnnnnnnnnnnnnnnnnnnnnnnnnnnnnnnnnnnnnnnnnnnnnnnnnnnnnnnnnnnnnnnnnnnnnnnnnnnnnnnnnnnnnnnnnnnnnnnnnnnnnnnnnnnnnnnnnnnnnnnnnnnnnnnnnnnnnnnnnnnnnnnnnnnnnnnnnnnnnnnnnnnnnnnnnnnnnnnnnnnnnnnnnnnnnnnnnnnnnnnnnnnnnnnnnnnnnnnnnnnnnnnnnnnnnnnnnnnnnnnnnnnnnnnnnnnnnnnnnnnnnnnnnnnnnnnnnnnnnnnnnnnnnnnnnnnnnnnnnnnnnnnnnnnnnnnnnnnnnnnnnnnnnnnnnnnnnnnnnnnnnnnnnnnnnnnnnnnnnnnnnnnnnnnnnnnnnnnnnnnnnnnnnnnnnnnnnnnnnnnnnnnnnnnnnnnnnnnnnnnnnnnnnnnnnnnnnnnnnnnnnnnnnnnnnnnnnnnnnnnnnnnnnnnnnnnnnnnnnnnnnnnnnnnnnnnnnnnnnnnnnnnnnnnnnnnnnnnnnnnnnnnnnnnnnnnnnnnnnnnnnnnnnnnnnnnnnnnnnnnnnnnnnnnnnnnnnnnnnnnnnnnnnnnnnnnnnnnnnnnnnnnnnnnnnnnnnnnnnnnnnnnnnnnnnnnnnnnnnnnnnnnnnnnnnnnnnnnnnnnnnnnnnnnnnnnnnnnnnnnnnnnnnnnnnnnnnnnnnnnnnnnnnnnnnnnnnnnnnnnnnnnnnnnnnnnnnnnnnnnnnnnnnnnnnnnnnnnnnnnnnnnnnnnnnnnnnnnnnnnnnnnnnnnnnnnnnnnnnnnnnnnnnnnnnnnnnnnnnnnnnnnnnnnnnnnnnnnnnnnnnnnnnnnnnnnnnnnnnnnnnnnnnnnnnnnnnnnnnnnnnnnnnnnnnnnnnnnnnnnnnnnnnnnnnnnnnnnnnnnnnnnnnnnnnnnnnnnnnnnnnnnnnnnnnnnnnnnnnnnnnnnnnnnnnnnnnnnnnnnnnnnnnnnnnnnnnnnnnnnnnnnnnnnnnnnnnnnnnnnnnnnnnnnnnnnnnnnnnnnnnnnnnnnnnnnnnnnnnnnnnnnnnnnnnnnnnnnnnnnnnnnnnnnnnnnnnnnnnnnnnnnnnnnnnnnnnnnnnnnnnnnnnnnnnnnnnnnnnnnnnnnnnnnnnnnnnnnnnnnnnnnnnnnnnnnnnnnnnnnnnnnnnnnnnnnnnnnnnnnnnnnnnnnnnnnnnnnnnnnnnnnnnnnnnnnnnnnnnnnnnnnnnnnnnnnnnnnnnnnnnnnnnnnnnnnnnnnnnnnnnnnnnnnnnnnnnnnnnnnnnnnnnnnnnnnnnnnnnnnnnnnnnnnnnnnnnnnnnnnnnnnnnnnnnnnnnnnnnnnnnnnnnnnnnnnnnnnnnnnnnnnnnnnnnnnnnnnnnnnnnnnnnnnnnnnnnnnnnnnnnnnnnnnnnnnnnnnnnnnnnnnnnnnnnnnnnnnnnnnnnnnnnnnnnnnnnnnnnnnnnnnnnnnnnnnnnnnnnnnnnnnnnnnnnnnnnnnnnnnnnnnnnnnnnnnnnnnnnnnnnnnnnnnnnnnnnnnnnnnnnnnnnnnnnnnnnnnnnnnnnnnnnnnnnnnnnnnnnnnnnnnnnnnnnnnnnnnnnnnnnnnnnnnnnnnnnnnnnnnnnnnnnnnnnnnnnnnnnnnnnnnnnnnnnnnnnnnnnnnnnnnnnnnnnnnnnnnnnnnnnnnnnnnnnnnnnnnnnnnnnnnnnnnnnnnnnnnnnnnnnnnnnnnnnnnnnnnnnnnnnnnnnnnnnnnnnnnnnnnnnnnnnnnnnnnnnnnnnnnnnnnnnnnnnnnnnnnnnnnnnnnnnnnnnnnnnnnnnnnnnnnnnnnnnnnnnnnnnnnnnnnnnnnnnnnnnnnnnnnnnnnnnnnnnnnnnnnnnnnnnnnnnnnnnnnnnnnnnnnnnnnnnnnnnnnnnnnnnnnnnnnnnnnnnnnnnnnnnnnnnnnnnnnnnnnnnnnnnnnnnnnnnnnnnnnnnnnnnnnnnnnnnnnnnnnnnnnnnnnnnnnnnnnnnnnnnnnnnnnnnnnnnnnnnnnnnnnnnnnnnnnnnnnnnnnnnnnnnnnnnnnnnnnnnnnnnnnnnnnnnnnnnnnnnnnnnnnnnnnnnnnnnnnnnnnnnnnnnnnnnnnnnnnnnnnnnnnnnnnnnnnnnnnnnnnnnnnnnnnnnnnnnnnnnnnnnnnnnnnnnnnnnnnnnnnnnnnnnnnnnnnnnnnnnnnnnnnnnnnnnnnnnnnnnnnnnnnnnnnnnnnnnnnnnnnnnnnnnnnnnnnnnnnnnnnnnnnnnnnnnnnnnnnnnnnnnnnnnnnnnnnnnnnnnnnnnnnnnnnnnnnnnnnnnnnnnnnnnnnnnnnnnnnnnnnnnnnnnnnnnnnnnnnnnnnnnnnnnnnnnnnnnnnnnnnnnnnnnnnnnnnnnnnnnnnnnnnnnnnnnnnnnnnnnnnnnnnnnnnnnnnnnnnnnnnnnnnnnnnnnnnnnnnnnnnnnnnnnnnnnnnnnnnnnnnnnnnnnnnnnnnnnnnnnnnnnnnnnnnnnnnnnnnnnnnnnnnnnnnnnnnnnnnnnnnnnnnnnnnnnnnnnnnnnnnnnnnnnnnnnnnnnnnnnnnnnnnnnnnnnnnnnnnnnnnnnnnnncgtgcgtacgtgactagcgatgatatctctgactctgagtcggatgaagaccctgaaattcacgcgcgtttccaggaaatcacggacgaacccagagtttttcagcccaaggtgcgagcgcgaattcagggtcaacttgtgagatctctggagaagaagcttctacgtctatcgctgggagcctggcgagtatgaagggtgccgagtggactcagacgctgacgaacgaggtctatcgcgtgatggataacatgggatggcgtccaccccaaccaggatcaaacgcgaactctggattccgttcccctcgccgcgagaacccgaattgggacaagttctgcgagaagtgcggcaagtaggagcatccagaggaaaactgctggaaagacgtcaagtgtgatcgctgcctggaagtaggtcatccaaatcacttgtgtcgcgcgcaaccgtgcgagtcctgtggcaaactacatctcggaaaaccgtgtgaagactggaagctgtgaagaaactcgcccgccaaggtgcactgaaggacatgccgagccaaatcctggataaactcctggatggcgaagcaaactctgggaagccgtcaaaccaataagcccgctgggtggggacccagtacgcgccgggctgaagaaggccccggagttatgtgttctagtgtatgtagggccggagttgagaacaagaacccaagataaccaacaatgcatgactactttgactcaggatttcatgacttcccctgaaaatcagcatcctaaacaagcgaactctgggtcggtgaactctgacgaaattgtggagtacaagttgaaccctggagagcgctacgggtggtgggaaaacaatgatcctgacccaaagaaacgtgatgtggtgatggtgctgtgaacgattgccgaacgagagtcctcctggataccggtgcgactgtgaatattgtgagattcgagttcgcgcgtaagctcggactcacactcaagtcgcacaaacaaaccaaggtgtctggcgtgggaggcgttccgacgtacatcgatgccagtgctcatgtgaagattactctcggttcgagggtgatatatctcctggacgtctgggttgctaacatcggcgaagggatcgaagtacttctgggtatgcgtttcatgtttgcagctggagtgaggatcagtgttcgcgaaggtctcgtgacacttccggatgaagaggcgatcatgatgtgtagatggactccagaggattgcctgggtgtcgacatgcccgtggaaaccacgggtagttggtacctggcccctggggaatccaaggtggtaaagatttcgtacggaccgacgaacccacagcgtgaagttgtgtgggcaggacgaggtgaccgctaggtaacgcacctgatttacgctgcgagatcctggccggtcgctgtgaaggtggtcaacatctcggacaagaacgtctggattcacaacagaacgccagtcgcctgaatagtggagtatggtttcttcccacgcgccgaacgctttgagcgccctggttcttttgcgtatcgggagtggcagactcttatcctggagagtgttcagtcacgtgagggcagacttcgtgcggaacgccgggctgcgctggagccatcctgtgtcgagaccccagagtatcagtggcctacgaagattctgccgcgacctgctaagggccccgacatggcactgcttgcctcgattctcaggaaaccggagacgcgtcgcgtgcgtttcgcggaagacgctgcaactcagaccgaagaagtgctccctggagaccctcctgagttccgagacgttgcggttgatacgagtgacttaggtgacgctctgaaggatgcggtgaccgatgctgcctcgcagactgtcggaatcccagagtgcatgagtcctggagatgatacggccgccgaaaccctgagtttacaggttgaagttggcagtgattctcagggtcagcggggcgaggaaggtgattctctgggattcgaggtggatgacgacgattctcagggtgctgtcgaagaatactgggatatcccgatctcagagatgcgggggtgtaatgggccccatttacataagtaggtagattgacagtacataaagtagttaagtcagtacacggctagcgtgtactgacggtcatcgtgattggctgaattgggggagccagaccccatttcagccaatcaggcgttgacctgcattgagtggctcacatgagaccaggggtagccgccctggtccttacataaaacggagttgattttacccaagactgactgcttggtctcattaaatccgagtcttaactaagcttcctcatcgctacgtgtaagctagtaacggacacacacctggcccgttacacctggaagcactttgtagtccttccaacgaccaagaccaagatgagccaagtcctgacgtccggaccttcaggggcaaccctggtgcatggtgccttcccccatctcacgcggattgagtgggaagctctccaccgcctcgcggcggtgtccggagaggctgttgtcacctcgctgctgagctcagcgatgccggaacaacagcgccaagcttcccatgaattcatggaacgcgagctcgccgacgcgaatcggcgggtcacaactccctcgcgctcctcgaggatcgacgtcgtcaaactcgagacatcgacatactccggtgtgggtgacgaccggcttccgctgaaccgctggttccgcgagatcgacatcgctatcgcctcgcgcatgattgaagcgccggcggccaaggtcaacttcctactctcccggctgtccgggaaggccaaggagtgggccctcggcaagctcgtcgtcgaccagcacgcgttccttggatgcgctccagattgacctccggctcgcgttcgagccgccccaagacgagtcgcgcgttcgtgctgagttcttcgccctcaaacaaggcaagatgtccatgcacgactacgtccagaagacacgacaccttgcgtcgtacattgtcacccaccccattgacatgacatctcaagtgcatgtctttgcgttcgggatgcgcgaaggcatgaagcggtactgtctcatgagagccgaaccctcctcgctcgaggaggcattcgccctcgcgctccgcgagggctacgtggtgtcggcatcgtacgcgcgcgctatgccggacgtctctcgggtatccgcacccgtgcccatggaaatcgacgcaattgaggcgtcgggtgatcgacggggctcagcttatggtggggaaggaggtcggagcgctcgtcctctgatttgcttccgctgccggaagattggtagagtgccgcgcgccagccccagttctcgcgcacgtcgatgccgacgctagcccggccgtccaaccaaaaaacggccggagccagtaggtgcggggcgccctactggatggaacgaaggtccgggttttccggtggcagcccagccttctatccctcccgtgctatatgcacgttttaatgctaccactacgagtagcgactcgaggctgatcatcgtcagcctccatgtcgccggcgcccgacgtccactgcgcgcgctcctcgactcaggagcgacaaacaacttcttgcgcgcgtcgtgtctggcggtgcttcctgcgagcgttcgcgtccggaagggtccgggcgaggtggaagtcaagcttgtggatggcaaggcccaccgcgtcgcgcgacgcgaggtgtccctgccgtacacgttcgacggctttcacagcaacgacgacttcctggtgatcgagatacattacgcgttcgactgcattctggggatcccgtggcttgcacggtatcagccagagattgactggctggctcggtcagtcaagcgtcgaagtggcttcgacgtacgtgaagtgttgacgcatctcttggtggctccaagagactggcctcacgttaccgtcgtggacaagacagccacgacgcaagttgtgcacagagcgagcgatggctctctctgtctggcatgtgccgtgctgttggatgatgattatgtccgggtgatatcgcgtgggcgcgatgacggacgcgtggtcgagcgacgtgcgctcccacacagtgagaacaagtcggcggtcgagcatgggttcccgtcgagctacatattggcggtcgagcatgagttcccgtcgagcaatgagtcggcggtcgagcatgggttcccgtcgagcaagatgtcgacggtcaagcgtgggttcccgtcgagcacgatgtcaacggtcgagcgtgggttcccgtcgcacaatgggacggcggtcgagcctggattcccgccacaagttgagcaggcggtcgagcatgagtcgctcccgcacaatgatgttgcggctgagagcgtggtgcagccgcgtaccgccggtgtgatcgagcgtggcctctcacacctagaagagggtgaatcatcgtcgagcgagagcgatgcgtcttcttcgagcgcccgctcgaagcgaaagaagaaatccaagcgacgccgcctgaagccccgtcgagaaccgtcagcgactgagaacccaccgaaggaatcggtgtgcgctcttgactacgtggagggcgctccacgacgatcgcgcgtcatcgaagtcgcgagtccgcctcgcgatgccaacacaatcacgcgtctcnnnnnnnnnnnnnnnnnnnnnnnnnnnnnnnnnnnnnnnnnnnnnnnnnnnnnnnnnnnnnnnnnnnnnnnnnnnnnnnnnnnnnnnnnnnnnnnnnnnnnnnnnnnnnnnnnnnnnnnnnnnnnnnnnnnnnnnnnnnnnnnnnnnnnnnnnnnnnnnnnnnnnnnnnnnnnnnnnnnnnnnnnnnnnnnnnnnnnnnnnnnnnnnnnnnnnnnnnnnnnnnnnnnnnnnnnnnnnnnnnnnnnnnnnnnnnnnnnnnnnnnnnnnnnnnnnnnnnnnnnnnnnnnnnnnnnnnnnnnnnnnnnnnnnnnnnnnnnnnnnnnnnnnnnnnnnnnnnnnnnnnnnnnnnnnnnnnnnnnnnnnnnnnnnnnnnnnnnnnnnnnnnnnnnnnnnnnnnnnnnnnnnnnnnnnnnnnnnnnnnnnnnnnnnnnnnnnnnnnnnnnnnnnnnnnnnnnnnnnnnnnnnnnnnnnnnnnnnnnnnnnnnnnnnnnnnnnnnnnnnnnnnnnnnnnnnnnnnnnnnnnnnnnnnnnnnnnnnnnnnnnnnnnnnnnnnnnnnnnnnnnnnnnnnnnnnnnnnnnnnnnnnnnnnnnnnnnnnnnnnnnnnnnnnnnnnnnnnnnnnnnnnnnnnnnnnnnnnnnnnnnnnnnnnnnnnnnnnnnnnnnnnnnnnnnnnnnnnnnnnnnnnnnnnnnnnnnnnnnnnnnnnnnnnnnnnnnnnnnnnnnnnnnnnnnnnnnnnnnnnnnnnnnnnnnnnnnnnnnnnnnnnnnnnnnnnnnnnnnnnnnnnnnnnnnnnnnnnnnnnnnnnnnnnnnnnnnnnnnnnnnnnnnnnnnnnnnnnnnnnnnnnnnnnnnnnnnnnnnnnnnnnnnnnnnnnnnnnnnnnnnnnnnnnnnnnnnnnnnnnnnnnnnnnnnnnnnnnnnnnnnnnnnnnnnnnnnnnnnnnnnnnnnnnnnnnnnnnnnnnnnnnnnnnnnnnnnnnnnnnnnnnnnnnnnnnnnnnnnnnnnnnnnnnnnnnnnnnnnnnnnnnnnnnnnnnnnnnnnnnnnnnnnnnnnnnnnnnnnnnnnnnnnnnnnnnnnnnnnnnnnnnnnnnnnnnnnnnnnnnnnnnnnnnnnnnnnnnnnnnnnnnnnnnnnnnnnnnnnnnnnnnnnnnnnnnnnnnnnnnnnnnnnnnnnnnnnnnnnnnnnnnnnnnnnnnnnnnnnnnnnnnnnnnnnnnnnnnnnnnnnnnnnnnnnnnnnnnnnnnnnnnnnnnnnnnnnnnnnnnnnnnnnnnnnnnnnnnnnnnnnnnnnnnnnnnnnnnnnnnnnnnnnnnnnnnnnnnnnnnnnnnnnnnnnnnnnnnnnnnnnnnnnnnnnnnnnnnnnnnnnnnnnnnnnnnnnnnnnnnnnnnnnnnnnnnnnnnnnnnnnnnnnnnnnnnnnnnnnnnnnnnnnnnnnnnnnnnnnnnnnnnnnnnnnnnnnnnnnnnnnnnnnnnnnnnnnnnnnnnnnnnnnnnnnnnnnnnnnnnnnnnnnnnnnnnnnnnnnnnnnnnnnnnnnnnnnnnnnnnnnnnnnnnnnnnnnnnnnnnnnnnnnnnnnnnnnnnnnnnnnnnnnnnnnnnnnnnnnnnnnnnnnnnnnnnnnnnnnnnnnnnnnnnnnnnnnnnnnnnnnnnnnnnnnnnnnnnnnnnnnnnnnnnnnnnnnnnnnnnnnnnnnnnnnnnnnnnnnnnnnnnnnnnnnnnnnnnnnnnnnnnnnnnnnnnnnnnnnnnnnnnnnnnnnnnnnnnnnnnnnnnnnnnnnnnnnnnnnnnnnnnnnnnnnnnnnnnnnnnnnnnnnnnnnnnnnnnnnnnnnnnnnnnnnnnnnnnnnnnnnnnnnnnnnnnnnnnnnnnnnnnnnnnnnnnnnnnnnnnnnnnnnnnnnnnnnnnnnnnnnnnnnnnnnnnnnnnnnnnnnnnnnnnnnnnnnnnnnnnnnnnnnnnnnnnnnnnnnnnnnnnnnnnnnnnnnnnnnnnnnnnnnnnnnnnnnnnnnnnnnnnnnnnnnnnnnnnnnnnnnnnnnnnnnnnnnnnnnnnnnnnnnnnnnnnnnnnnnnnnnnnnnnnnnnnnnnnnnnnnnnnnnnnnnnnnnnnnnnnnnnnnnnnnnnnnnnnnnnnnnnnnnnnnnnnnnnnnnnnnnnnnnnnnnnnnnnnnnnnnnnnnnnnnnnnnnnnnnnnnnnnnnnnnnnnnnnnnnnnnnnnnnnnnnnnnnnnnnnnnnnnnnnnnnnnnnnnnnnnnnnnnnnnnnnnnnnnnnnnnnnnnnnnnnnnnnnnnnnnnnnnnnnnnnnnnnnnnnnnnnnnnnnnnnnnnnnnnnnnnnnnnnnnnnnnnnnnnnnnnnnnnnnnnnnnnnnnnnnnnnnnnnnnnnnnnnnnnnnnnnnnnnnnnnnnnnnnnnnnnnnnnnnnnnnnnnnnnnnnnnnnnnnnnnnnnnnnnnnnnnnnnnnnnnnnnnnnnnnnnnnnnnnnnnnnnnnnnnnnnnnnnnnnnnnnnnnnnnnnnnnnnnnnnnnnnnnnnnnnnnnnnnnnnnnnnnnnnnnnnnnnnnnnnnnnnnnnnnnnnnnnnnnnnnnnnnnnnnnnnnnnnnnnnnnnnnnnnnnnnnnnnnnnnnnnnnnnnnnnnnnnnnnnnnnnnnnnnnnnnnnnnnnnnnnnnnnnnnnnnnnnnnnnnnnnnnnnnnnnnnnnnnnnnnnnnnnnnnnnnnnnnnnnnnnnnnnnnnnnnnnnnnnnnnnnnnnnnnnnnnnnnnnnnnnnnnnnnnnnnnnnnnnnnnnnnnnnnnnnnnnnnnnnnnnnnnnnnnnnnnnnnnnnnnnnnnnnnnnnnnnnnnnnnnnnnnnnnnnnnnnnnnnnnnnnnnnnnnnnnnnnnnnnnnnnnnnnnnnnnnnnnnnnnnnnnnnnnnnnnnnnnnnnnnnnnnnnnnnnnnnnnnnnnnnnnnnnnnnnnnnnnnnnnnnnnnnnnnnnnnnnnnnnnnnnnnnnnnnnnnnnnnnnnnnnnnnnnnnnnnnnnnnnnnnnnnnnnnnnnnnnnnnnnnnnnnnnnnnnnnnnnnnnnnnnnnnnnnnnnnnnnnnnnnnnnnnnnnnnnnnnnnnnnnnnnnnnnnnnnnnnnnnnnnnnnnnnnnnnnnnnnnnnnnnnnnnnnnnnnnnnnnnnnnnnnnnnnnnnnnnnnnnnnnnnnnnnnnnnnnnnnnnnnnnnnnnnnnnnnnnnnnnnnnnnnnnnnnnnnnnnnnnnnnnnnnnnnnnnnnnnnnnnnnnnnnnnnnnnnnnnnnnnnnnnnnnnnnnnnnnnnnnnnnnnnnnnnnnnnnnnnnnnnnnnnnnnnnnnnnnnnnnnnnnnnnnnnnnnnnnnnnnnnnnnnnnnnnnnnnnnnnnnnnnnnnnnnnnnnnnnnnnnnnnnnnnnnnnnnnnnnnnnnnnnnnnnnnnnnnnnnnnnnnnnnnnnnnnnnnnnnnnnnnnnnnnnnnnnnnnnnnnnnnnnnnnnnnnnnnnnnnnnnnnnnnnnnnnnnnnnnnnnnnnnnnnnnnnnnnnnnnnnnnnnnnnnnnnnnnnnnnnnnnnnnnnnnnnnnnnnnnnnnnnnnnnnnnnnnnnnnnnnnnnnnnnnnnnnnnnnnnnnnnnnnnnnnnnnnnnnnnnnnnnnnnnnnnnnnnnnnnnnnnnnnnnnnnnnnnnnnnnnnnnnnnnnnnnnnnnnnnnnnnnnnnnnnnnnnnnnnnnnnnnnnnnnnnnnnnnnnnnnnnnnnnnnnnnnnnnnnnnnnnnnnnnnnnnnnnnnnnnnnnnnnnnnnnnnnnnnnnnnnnnnnnnnnnnnnnnnnnnnnnnnnnnnnnnnnnnnnnnnnnnnnnnnnnnnnnnnnnnnnnnnnnnnnnnnnnnnnnnnnnnnnnnnnnnnnnnnnnnnnnnnnnnnnnnnnnnnnnnnnnnnnnnnnnnnnnnnnnnnnnnnnnnnnnnnnnnnnnnnnnnnnnnnnnnnnnnnnnnnnnnnnnnnnnnnnnnnnnnnnnnnnnnnnnnnnnnnnnnnnnnnnnnnnnnnnnnnnnnnnnnnnnnnnnnnnnnnnnnnnnnnnnnnnnnnnnnnnnnnnnnnnnnnnnnnnnnnnnnnnnnnnnnnnnnnnnnnnnnnnnnnnnnnnnnnnnnnnnnnnnnnnnnnnnnnnnnnnnnnnnnnnnnnnnnnnnnnnnnnnnnnnnnnnnnnnnnnnnnnnnnnnnnnnnnnnnnnnnnnnnnnnnnnnnnnnnnnnnnnnnnnnnnnnnnnnnnnnnnnnnnnnnnnnnnnnnnnnnnnnnnnnnnnnnnnnnnnnnnnnnnnnnnnnnnnnnnnnnnnnnnnnnnnnnnnnnnnnnnnnnnnnnnnnnnnnnnnnnnnnnnnnnnnnnnnnnnnnnnnnnnnnnnnnnnnnnnnnnnnnnnnnnnnnnnnnnnnnnnnnnnnnnnnnnnnnnnnnnnnnnnnnnnnnnnnnnnnnnnnnnnnnnnnnnnnnnnnnnnnnnnnnnnnnnnnnnnnnnnnnnnnnnnnnnnnnnnnnnnnnnnnnnnnnnnnnnnnnnnnnnnnnnnnnnnnnnnnnnnnnnnnnnnnnnnnnnnnnnnnnnnnnnnnnnnnnnnnnnnnnnnnnnnnnnnnnnnnnnnnnnnnnnnnnnnnnnnnnnnnnnnnnnnnnnnnnnnnnnnnnnnnnnnnnnnnnnnnnnnnnnnnnnnnnnnnnnnnnnnnnnnnnnnnnnnnnnnnnnnnnnnnnnnnnnnnnnnnnnnnnnnnnnnnnnnnnnnnnnnnnnnnnnnnnnnnnnnnnnnnnnnnnnnnnnnnnnnnnnnnnnnnnnnnnnnnnnnnnnnnnnnnnnnnnnnnnnnnnnnnnnnnnnnnnnnnnnnnnnnnnnnnnnnnnnnnnnnnnnnnnnnnnnnnnnnnnnnnnnnnnnnnnnnnnnnnnnnnnnnnnnnnnnnnnnnnnnnnnnnnnnnnnnnnnnnnnnnnnnnnnnnnnnnnnnnnnnnnnnnnnnnnnnnnnnnnnnnnnnnnnnnnnnnnnnnnnnnnnnnnnnnnnnnnnnnnnnnnnnnnnnnnnnnnnnnnnnnnnnnnnnnnnnnnnnnnnnnnnnnnnnnnnnnnnnnnnnnnnnnnnnnnnnnnnnnnnnnnnnnnnnnnnnnnnnnnnnnnnnnnnnnnnnnnnnnnnnnnnnnnnnnnnnnnnnnnnnnnnnnnnnnnnnnnnnnnnnnnnnnnnnnnnnnnnnnnnnnnnnnnnnnnnnnnnnnnnnnnnnnnnnnnnnnnnnnnnnnnnnnnnnnnnnnnnnnnnnnnnnnnnnnnnnnnnnnnnnnnnnnnnnnnnnnnnnnnnnnnnnnnnnnnnnnnnnnnnnnnnnnnnnnnnnnnnnnnnnnnnnnnnnnnnnnnnnnnnnnnnnnnnnnnnnnnnnnnnnnnnnnnnnnnnnnnnnnnnnnnnnnnnnnnnnnnnnnnnnnnnnnnnnnnnnnnnnnnnnnnnnnnnnnnnnnnnnnnnnnnnnnnnnnnnnnnnnnnnnnnnnnnnnnnnnnnnnnnnnnnnnnnnnnnnnnnnnnnnnnnnnnnnnnnnnnnnnnnnnnnnnnnnnnnnnnnnnnnnnnnnnnnnnnnnnnnnnnnnnnnnnnnnnnnnnnnnnnnnnnnnnnnnnnnnnnnnnnnnnnnnnnnnnnnnnnnnnnnnnnnnnnnnnnnnnnnnnnnnnnnnnnnnnnnnnnnnnnnnnnnnnnnnnnnnnnnnnnnnnnnnnnnnnnnnnnnnnnnnnnnnnnnnnnnnnnnnnnnnnnnnnnnnnnnnnnnnnnnnnnnnnnnnnnnnnnnnnnnnnnnnnnnnnnnnnnnnnnnnnnnnnnnnnnnnnnnnnnnnnnnnnnnnnnnnnnnnnnnnnnnnnnnnnnnnnnnnnnnnnnnnnnnnnnnnnnnnnnnnnnnnnnnnnnnnnnnnnnnnnnnnnnnnnnnnnnnnnnnnnnnnnnnnnnnnnnnnnnnnnnnnnnnnnnnnnnnnnnnnnnnnnnnnnnnnnnnnnnnnnnnnnnnnnnnnnnnnnnnnnnnnnnnnnnnnnnnnnnnnnnnnnnnnnnnnnnnnnnnnnnnnnnnnnnnnnnnnnnnnnnnnnnnnnnnnnnnnnnnnnnnnnnnnnnnnnnnnnnnnnnnnnnnnnnnnnnnnnnnnnnnnnnnnnnnnnnnnnnnnnnnnnnnnnnnnnnnnnnnnnnnnnnnnnnnnnnnnnnnnnnnnnnnnnnnnnnnnnnnnnnnnnnnnnnnnnnnnnnnnnnnnnnnnnnnnnnnnnnnnnnnnnnnnnnnnnnnnnnnnnnnnnnnnnnnnnnnnnnnnnnnnnnnnnnnnnnnnnnnnnnnnnnnnnnnnnnnnnnnnnnnnnnnnnnnnnnnnnnnnnnnnnnnnnnnnnnnnnnnnnnnnnnnnnnnnnnnnnnnnnnnnnnnnnnnnnnnnnnnnnnnnnnnnnnnnnnnnnnnnnnnnnnnnnnnnnnnnnnnnnnnnnnnnnnnnnnnnnnnnnnnnnnnnnnnnnnnnnnnnnnnnnnnnnnnnnnnnnnnnnnnnnnnnnnnnnnnnnnnnnnnnnnnnnnnnnnnnnnnnnnnnnnnnnnnnnnnnnnnnnnnnnnnnnnnnnnnnnnnnnnnnnnnnnnnnnnnnnnnnnnnnnnnnnnnnnnnnnnnnnnnnnnnnnnnnnnnnnnnnnnnnnnnnnnnnnnnnnnnnnnnnnnnnnnnnnnnnnnnnnnnnnnnnnnnnnnnnnnnnnnnnnnnnnnnnnnnnnnnnnnnnnnnnnnnnnnnnnnnnnnnnnnnnnnnnnnnnnnnnnnnnnnnnnnnnnnnnnnnnnnnnnnnnnnnnnnnnnnnnnnnnnnnnnnnnnnnnnnnnnnnnnnnnnnnnnnnnnnnnnnnnnnnnnnnnnnnnnnnnnnnnnnnnnnnnnnnnnnnnnnnnnnnnnnnnnnnnnnnnnnnnnnnnnnnnnnnnnnnnnnnnnnnnnnnnnnnnnnnnnnnnnnnnnnnnnnnnnnnnnnnnnnnnnnnnnnnnnnnnnnnnnnnnnnnnnnnnnnnnnnnnnnnnnnnnnnnnnnnnnnnnnnnnnnnnnnnnnnnnnnnnnnnnnnnnnnnnnnnnnnnnnnnnnnnnnnnnnnnnnnnnnnnnnnnnnnnnnnnnnnnnnnnnnnnnnnnnnnnnnnnnnnnnnnnnnnnnnnnnnnnnnnnnnnnnnnnnnnnnnnnnnnnnnnnnnnnnnnnnnnnnnnnnnnnnnnnnnnnnnnnnnnnnnnnnnnnnnnnnnnnnnnnnnnnnnnnnnnnnnnnnnnnnnnnnnnnnnnnnnnnnnnnnnnnnnnnnnnnnnnnnnnnnnnnnnnnnnnnnnnnnnnnnnnnnnnnnnnnnnnnnnnnnnnnnnnnnnnnnnnnnnnnnnnnnnnnnnnnnnnnnnnnnnnnnnnnnnnnnnnnnnnnnnnnnnnnnnnnnnnnnnnnnnnnnnnnnnnnnnnnnnnnnnnnnnnnnnnnnnnnnnnnnnnnnnnnnnnnnnnnnnnnnnnnnnnnnnnnnnnnnnnnnnnnnnnnnnnnnnnnnnnnnnnnnnnnnnnnnnnnnnnnnnnnnnnnnnnnnnnnnnnnnnnnnnnnnnnnnnnnnnnnnnnnnnnnnnnnnnnnnnnnnnnnnnnnnnnnnnnnnnnnnnnnnnnnnnnnnnnnnnnnnnnnnnnnnnnnnnnnnnnnnnnnnnnnnnnnnnnnnnnnnnnnnnnnnnnnnnnnnnnnnnnnnnnnnnnnnnnnnnnnnnnnnnnnnnnnnnnnnnnnnnnnnnnnnnnnnnnnnnnnnnnnnnnnnnnnnnnnnnnnnnnnnnnnnnnnnnnnnnnnnnnnnnnnnnnnnnnnnnnnnnnnnnnnnnnnnnnnnnnnnnnnnnnnnnnnnnnnnnnnnnnnnnnnnnnnnnnnnnnnnnnnnnnnnnnnnnnnnnnnnnnnnnnnnnnnnnnnnnnnnnnnnnnnnnnnnnnnnnnnnnnnnnnnnnnnnnnnnnnnnnnnnnnnnnnnnnnnnnnnnnnnnnnnnnnnnnnnnnnnnnnnnnnnnnnnnnnnnnnnnnnnnnnnnnnnnnnnnnnnnnnnnnnnnnnnnnnnnnnnnnnnnnnnnnnnnnnnnnnnnnnnnnnnnnnnnnnnnnnnnnnnnnnnnnnnnnnnnnnnnnnnnnnnnnnnnnnnnnnnnnnnnnnnnnnnnnnnnnnnnnnnnnnnnnnnnnnnnnnnnnnnnnnnnnnnnnnnnnnnnnnnnnnnnnnnnnnnnnnnnnnnnnnnnnnnnnnnnnnnnnnnnnnnnnnnnnnnnnnnnnnnnnnnnnnnnnnnnnnnnnnnnnnnnnnnnnnnnnnnnnnnnnnnnnnnnnnnnnnnnnnnnnnnnnnnnnnnnnnnnnnnnnnnnnnnnnnnnnnnnnnnnnnnnnnnnnnnnnnnnnnnnnnnnnnnnnnnnnnnnnnnnnnnnnnnnnnnnnnnnnnnnnnnnnnnnnnnnnnnnnnnnnnnnnnnnnnnnnnnnnnnnnnnnnnnnnnnnnnnnnnnnnnnnnnnnnnnnnnnnnnnnnnnnnnnnnnnnnnnnnnnnnnnnnnnnnnnnnnnnnnnnnnnnnnnnnnnnnnnnnnnnnnnnnnnnnnnnnnnnnnnnnnnnnnnnnnnnnnnnnnnnnnnnnnnnnnnnnnnnnnnnnnnnnnnnnnnnnnnnnnnnnnnnnnnnnnnnnnnnnnnnnnnnnnnnnnnnnnnnnnnnnnnnnnnnnnnnnnnnnnnnnnnnnnnnnnnnnnnnnnnnnnnnnnnnnnnnnnnnnnnnnnnnnnnnnnnnnnnnnnnnnnnnnnnnnnnnnnnnnnnnnnnnnnnnnnnnnnnnnnnnnnnnnnnnnnnnnnnnnnnnnnnnnnnnnnnnnnnnnnnnnnnnnnnnnnnnnnnnnnnnnnnnnnnnnnnnnnnnnnnnnnnnnnnnnnnnnnnnnnnnnnnnnnnnnnnnnnnnnnnnnnnnnnnnnnnnnnnnnnnnnnnnnnnnnnnnnnnnnnnnnnnnnnnnnnnnnnnnnnnnnnnnnnnnnnnnnnnnnnnnnnnnnnnnnnnnnnnnnnnnnnnnnnnnnnnnnnnnnnnnnnnnnnnnnnnnnnnnnnnnnnnnnnnnnnnnnnnnnnnnnnnnnnnnnnnnnnnnnnnnnnnnnnnnnnnnnnnnnnnnnnnnnnnnnnnnnnnnnnnnnnnnnnnnnnnnnnnnnnnnnnnnnnnnnnnnnnnnnnnnnnnnnnnnnnnnnnnnnnnnnnnnnnnnnnnnnnnnnnnnnnnnnnnnnnnnnnnnnnnnnnnnnnnnnnnnnnnnnnnnnnnnnnnnnnnnnnnnnnnnnnnnnnnnnnnnnnnnnnnnnnnnnnnnnnnnnnnnnnnnnnnnnnnnnnnnnnnnnnnnnnnnnnnnnnnnnnnnnnnnnnnnnnnnnnnnnnnnnnnnnnnnnnnnnnnnnnnnnnnnnnnnnnnnnnnnnnnnnnnnnnnnnnnnnnnnnnnnnnnnnnnnnnnnnnnnnnnnnnnnnnnnnnnnnnnnnnnnnnnnnnnnnnnnnnnnnnnnnnnnnnatccactccatggctgtgtcgtacttgagcccagcaagaatagcctgacgcacgtctggccgaacttccttccagacgacacccccagggagcatcgtgtgtgcggcctccttggacaccacagtcttctcgccggcgcgacgcacagagtcgcggccaggctgatgatccttgggacgacgctggaccttgtgaacctgggggcttgcggagttcgactgcgtttttggcacctcagagtcccgtgattttctggagccttgaccgttcttggaaccctgagattttctggaatcctaagttttgcctccggccttcgcgccgctgcgagacttgctgccaggacccgtgagatccagaatttcaggacgacggacgacccagaccctgaagacggaggcatacgcgtgctcttctctggatacggggccgccgcagccttgcgcttgtccatggccgtgacgttgatgacagtgtcccaggattcaggaggcttcgagtccttgatgcagagattgaagaggtcgtggagacgctcccaattgcccgtgaagtctgtgtgctcctggaggaagtcagggaacttccaggggtccacggtggctaactcaagacgcgatttcaggattcgcacttgtgcctcagagtcggcaaggcgcgccttgagttgtgccttctcggactccagagaatcaatctcgtcttggtaccgcgtcttttgctcgcccagcgcgactttgtacttggattcagcatcatccaccttgcccagggcctcttggacctccaagaaccagtagtcgcacgtgaatttccaggtgcgcttcagttccttatacttgcgtcgcgtgtcgactacttcctgagtggcggtgaaaccctgctgagagtcagccagagaacgcatgtttcggtaggccccgaggactcgacgcaggtaaccagtcatcttgaacacgcgctcagcgagccttgtgctgttgaagtgacgcaggagtgaggccatctcgcgtcgaatgccgatggaattcagggtgttgtccaactcgaatgcggaaagaggcgaacgacgtggacacaggacgtcgatcccagcgttggcaccgcagacttccttcaacccctgaagattctcgtcggagagctcctcgaagccgatcagcgtagacgcgccgccgtagccttccatggcgaatgcacccgcgcgaatatcgttcacgatccctgggactcccacgagatatgcgttggtcttgagatccggcggggttggcagtgtccaatgcggtgggtgcacagggagtacgaagtcggggacatccacctcctgctgccgaagcatacccgcgaagacgagccccctgacgtcctccagcgtcgcgtgtcgtggtaacttgaactcaggggcatcctccaggttcacgtccgcagccgtgtcgcctgcgtctggagctttagactctgagttcgcgtcaccagtttcctgggctgcagcgtcagccgaggcagtgccatcggcctcgcgcatattcgcgtcagaggttttgcccgcgtcgccggagaaggagacgcgcttagtttcccccgtcctggtgacgcccgccgaagtgttgctggacgctgagttgcccgcctggtcgccgccgccgcccgctggagcggtgttcgcaggagcgtcgccggtgcgttgctgcgtcggaggtggcgcgctgcaggggggcgccgtgccttgagctggcaccgtcgcttgcttgccgtccgaaggcacgctctccgccatgttgatgatctgtgaaatggcgatgtgaccgcgcattgcccgttggagtttttgcgtttgagaagagaaccttgaagataggtcctgaccaaccgttgggtagacagggtgtcgccaaagtgagtgaaatcctgggagtcgacagagtgcgacggccgtatcgaagtcgacggtggatcgccctctgtgtttgtgtggcctggccatgattcaccggttcggagttattgcctctttgatgtacctggaccaggaggggcggttgacacgaggcggtccccagaaaatcgccgacgatgtgccgccaccctttggacttggagtttgtattggatgctgattggtggatgacttggatacggcgcggctgtacccgtgtgacatggatggcgactgtgggagagaagtgatttctcggggtgaatccagcgcctgaccacagatgggcccaactggctggaagtgtgaatcctgggagtgcacgcccaggatttcagagaacactcattccagccgcggactttcccttacgatgagtgcctaaagtctggtggaaagtgtctctggcgaatgtatcccagagtacacctcatcttgctgtggctcaagtagtatataacatcataaaatgaggttagtttttcacgaaatatgacattagcgagatttcttgttgaagctctacatcattagaatttcaagtgatataaagttgttcagacccggtttagatctcctacaagcaacgctaaaacgtggtaaagttccaaggtacccaccttcacaaatcaaaatccaaatatttgtcaaggtacctaccttcatgaaacgaaggcagttttttcgccaaggtacctaccttcataaaacgaagtcagtttttctcaaatttttaccaagacatgaaagatctaaaaccgatagttaggagtttccttatagcagcgaccttttatagataaatggtttcgtaaccaatgcgatcttaagatctcgtgttcatgctagaagagtagggagtgctcattctgcattctaccaagtcaatcagcagtcaagatgaacccgtccaacctacagcaggagatggatgctctcaacactcgcggagcagagctcaagaagatgatcgatgacacgcatcccgtcgcccgcatcgcagaagagaaagcgaagaagtttgcgagcgactataaaggggttcaagcagaggaggctgagaagatagcggaggcgagtgctaaaactgaagaaaaggtgaggaagatgactgcaaaactcaaggcggccaaggaagaagcccagctgacgagtctaaagcgagaatggctcgtcaagcgggagaaggcgttcggtgacatggatcgtgcgcccaaggagaatgtggatatatcaagcaagctgatagagctcgagcgtcagtacctgaacacccagcgccactaccaagagctacgcgatcaactccagacggtcaacggtgttgctgacatcaagctggagtagctgtagcaggcaatttgcaatgaattaggtaaaatattaaatgcggattttaccttaaaattttcaattatataaaagtgagtccatctcaagcgacgaaatgataaaatatataacatatcatacgatgactgtgttttggcatggatgtaaaagctgtttaaggacgaattatggttgcgggcatcataagagaactatagctatgcaacgtactgtgagagcattaagagttcttaggatagcagatagggatggatcgtttcatgaactgatcgagctgttagtggacttctcaaggcgactagataataatgcagattggaaggaattatttaataagtgcgttccatacatgtggcaatatgaataatttataattttttggctcaaaatcgaaaatgcatttaattatcttcatttctgataattaatttccattagtatataacacaatatcatataatacaaaataattaattatggtttacgttcgcgaaaattatgagcttaacaaggaggcttttaaagcagctcagaagcgttactatctaaagaatagagagcagcgtctaactaatcaaaaggagtataatgagttgcacaaggaggagctagcgcaacgcagaaaaatcagaaaccaaaacaagaaactaaaatcgaaacttcccacgagaattgaggtttcgaacgaagtagagagtgaaaatgacaaagaagtgtaaaattatatattaatattttttattttttataaatataaaagacccatcctgagagataaaatcttataaaatatagtagagcggatatacaacgacgatgtttggatatgaattagaaggacttaagcgacttggggttacatgtaccaagtggggtagtagtttccgtgttaaggtgcttggacgcaccaagaaaatggtttacatcagcaatgttggtaacccgaaaaatagagaattgattgctaagcagtacaaactatctatgaagaaactaaacactcatctgtcacctaactacaagggggacccttactaccggttttatcaaggtaaacttaaggaatcgcatctatatgaggatatttctccatcagaattgtatgataagctagagactattctcagctctcagttgaagnnnnnnnnnnnnnnnnnnnnnnnnnnnnnnnnnnnnnnnnnnnnnnnnnnnnnnnnnnnnnnnnnnnnnnnnnnnnnnnnnnnnnnnnnnnnnnnnnnnnnnnnnnnnnnnnnnnnnnnnnnnnnnnnnnnnnnnnnnnnnnnnnnnnnnnnnnnnnnnnnnnnnnnnnnnnnnnnnnnnnnnnnnnnnnnnnnnnnnnnnnnnnnnnnnnnnnnnnnnnnnnnnnnnnnnnnnnnnnnnnnnnnnnnnnnnnnnnnnnnnnnnnnnnnnnnnnnnnnnnnnnnnnnnnnnnnnnnnnnnnnnnnnnnnnnnnnnnnnnnnnnnnnnnnnnnnnnnnnnnnnnnnnnnnnnnnnnnnnnnnnnnnnnnnnnnnnnnnnnnnnnnnnnnnnnnnnnnnnnnnnnnnnnnnnnnnnnnnnnnnnnnnnnnnnnnnnnnnnnnnnnnnnnnnnnnnnnnnnnnnnnnnnnnnnnnnnnnnnnnnnnnnnnnnnnnnnnnnnnnnnnnnnnnnnnnnnnnnnnnnnnnnnnnnnnnnnnnnnnnnnnnnnnnnnnnnnnnnnnnnnnnnnnnnnnnnnnnnnnnnnnnnnnnnnnnnnnnnnnnnnnnnnnnnnnnnnnnnnnnnnnnnnnnnnnnnnnnnnnnnnnnnnnnnnnnnnnnnnnnnnnnnnnnnnnnnnnnnnnnnnnnnnnnnnnnnnnnnnnnnnnnnnnnnnnnnnnnnnnnnnnnnnnnnnnnnnnnnnnnnnnnnnnnnnnnnnnnnnnnnnnnnnnnnnnnnnnnnnnnnnnnnnnnnnnnnnttcgcgaaaattatgagcttaacaaggaggcttttaaagcagctcagaagcgttactatctaaagaatagagagcagcgtctaactaatcaaaaggagtataatgagttgcacaaggaggagctagcgcaacgcagaaaaatcagaaaccaaaacaagaaactaaaatcgaaacttcccacgagaattgaggtttcgacgaagtagagagtgaaaatgacaaagaagtgtaaaattatatattaatattttttattttttataaatataaaagacccatcctgagagataaaatcttataaaatatagtagagcggatatacaacgacgatgtttggatatgaattagaaggacttaagcgacttggggttacatgtaccaagtggggtagtagtttccgtgttaaggtgcttggacgcaccaagaaaatggtttacatcagcaatgttggtaacccgaaaaatagagaattgattgctaagcagtacaaactatctatgaagaaactaaacactcatctgtcacctaactacaagggggacccttactaccggttttatcaaggtaaacttaaggaatcgcatctatatgagaatatttctccatcagaattgtatgataagctagagactattctcagctctcagttgaaggcgttcaagatcaatatcgctcttggatacgagttggagagtctcagtgacggtcagaaactatactggcatcctagtctatcgagcaccaacgtcttcgacaagcctatcacggttaacagtaaatctgacattcgcaagaaagtcattcctgaaatcagaacgatggagcgtgctgataggttaaaatacccaaaatctggctacaaattaaaggctatcacaggattcagagtatacaattataagcgtaactatacgctaggtgatagcgccgctgttattccgaaggagttccgcgatagtatacatattatcaatttccccaagacgaataataaatgtgtcttccactgtattgcttaccacggactaggaattgcaaaacaaaatcctagaacgattcaagtgcatgtgaaagctgctttcaagaagtattgcgagtttaaaaacattgaatacagtctcagcctgtttcgtagttttaaaccgattgatatcttccactttgacgagcttgaggagtgtttcaagcttgctatcaatgtatacagcaaggatgtatccagcggtgaagttaaatgcgagcgcgaatcagagaaggcgtacaacgttctaaacatcctatcacacagcaaccgcgcgttgtacatcaataatatggataagttcatgagtaaatatttatgctcaaaatgtgaaatgatttttgcgacctctacgaagctgaacgaccatcaaaagaatcaatgtgataaaacaaatattatgtcatttgctaagcaaccaacgatctaccagcctggcaaaaactgtgcatttcaaatgatgcagaaatataaagttcacgacgctactccttataacgaccatttcatcgtatatgactttgaatctatcttgaagccaactaacattcagtcaggagagaatactgtcttcatgaatgagcatattcctgtcagtgtttcaattcttaatacgttgacgaattcatatttctgtattgtagaagaaaccctacctccagaatagttcgtccctcccattttttaccatgcctgtggtgaatgggggactcgacactaccactgtggagttcaatcttactggggcaagcccccacgctcgcgtggaactagaccaagatgtgctaaaccagactttacttccgccacagcacgttgagatgaaccacatgaacacgtaccagcctactcatgcgccgccaagatcctgggggtatgcaaacagaaagccattttaattggtttagatactgcatttatatatacttcattgattagttcttattgaaatctattgattgacttggtactaaaccgcgagcaagtgttatgcaatatgcttgttctcatgttgctcctatcttggtcacacacataatgcatactgttcgactgatcgaagtgcggtgctatctctgcttcaatgtcggtgtgcgaagacaacatcaacttactctgtacttgctcttcttcttttgcattgtttggtggcgttggagcgcgctgtttgtaatgtagtgggggtcctagagggcttatcacttgtagcaaccatcaaggcgacgataccatagcatccattatgttacatgtaagatagagcggaatgtgtacccgttcaggcgcaacgtttctctaaatatcagtattgcatagaatgcactgtgagcagctcatcggaggatttttatccgcagatcacaccagtcccttcaagtggaataattaccagggagcttagcaacaaactgtgtgaagaaaagccaaatttattctcgcgttcactatgtcatactgagtctcatacgatttcttatgccgtccaggacggtttaagcgtttttttataccgtccatgtcacccctccgcgtccaaggggttaagagcgacccggagatcaaagtatcttccaccaagcgtatccctaacgttatcgatctaaatcagggttcgtatcaaaatggagttatcactattgatgccacggctcaacttaatggttcggaaggattcgcgtgccttcgtgatgcttgcattatgctaccgtacaaggtttcgatgaagaatggtgccactgcacaaacggctgccgcaaatcgtttctgcgccactcttaattgtggtaatttcaatgtaattgactcgatgtcgttggagttaaatggtaagactattatttcgatggcggactacaagttattctggaataatgttcgtgctcagacaggatacagtactcagtacgttgagaagcatggtgcagagtcgttcctataccctgatgctgctcagtcggtatcgtacagttctggttccgcttctactagtggtgatggatattctaacactatggctttctcgtcatcgtttagtacttccgctcctcctggtggtgcaactatccctaatgacggcttcgttaagcgtctactatcgaatcctccgacagcaggcgctgatttctctagcagttggccttcggtaggtgctgcttctgcttctactaccatttccagtcaaacggctcgtggtgcttttgttgctggcgcatctactgctaacgctatcatgggtacgtggaactacatgctctagattaaattaactgatctccacccgattttccgtgagctcgatttaatggctaaccctcagattcggcttcgtttccgcgtgaatcaggattcgtctgctatcgctgttggtgctaccaagggtatgtcacttacttcgaccactctgtcatccggcaatacttgtccggtaatggttgcaagctctgctagtggtaatccgctgaatggtgtacttgccgcttctgcaggcttcagtgttgcttggggtgctgttgttaactctcgtgagcctatgattgatggtacttacatacagctcgtctatatgtaccgttcgtcaaccttgaaaaccctcaagctatcatctctaaaccagttaagaaggttcgctacaatgattgctatgctcagtggttctaccaacgcgccggcattcgtaagcaatcgactcagcttaatgcatcgtttgatcttcagctatcggcttcggttaaaaatgctaagtatatcgtagtattaccattcgctgaacaaactaacaacttcgcatctgctggtgttccacagttccagagcccattcgattccgccccatggacgcttcaacctggatcttcgattcgaaactttaatattcgcattggttcatctcagacgtttgatctcaatcatgagtatatgtatgcagtactgcttgcggaacaaaggcgaataagaacagaacgagaacaagcttcggatagcaataagcgcagacacaatgacgaagataaccagccgagtcggaaacgtcgtaaagttgatagacagcgggaagcagagtatcaacgccttcaccggcttcgaaaccaagcatgaagagacgagactgcgttttatacctccgcggagctcgatgcaatggatagcactttaaacattaaggaaccaaccgaggtagacctagctagacttcagcgttctgcagttaggatgtttgaggcttcaaccggtgaaggagcaatttgctgcgtgtgcgagcttttgtatcctatgaatgatgtacaactgacacctttgacggataccattgccgaggtaagatgttctctggttaatttaggtgtcatgcgaaacttctcttacccttgtgttcgacagagcatgacgcggttattgcggatacccgacaacgccgatataccagagtttatcttgaagcaatacgacgcgtcagcactcgatgcttggatgaaggaccttctccttttcccaccaggtaagatacaatggaaacattcagctactactgtgttcttatactcgctctaatgttgtagccattcacagagaaaataactcaacaattatgcaggtttgtcgcgactgcttcgaatatatcagcaataaaagtaatcgcaagcctcctgctttcgccattgcggatggcaattatgaaggttggctaccgcaagagtttccaccactttctcgtaccgatgaacaagccattgcattggtggcaccttgtgtgtccatatcaacagtcgctggaggaaattgcaaaacaatacgatcacatcactacatggtgaaaatactgaagggcccatcatttccatgctccctcgcgatatctcagagcgcgtgcgcgtgaccattgttggaaatctaacttctgagcaagatgcagcctgtcggaaacgctatgaattaaatgttgaaaactgccgccaggtagtggcatttctaatggaaaacaacaaggtatatcgagaacataaagatgagtggcaattgaatgcaaacgaaagttttagaacccgaataatccaaagagcaggtacatcaacattaaacagtgataatgataatctagccgaagctgtaagagactacgctacatacaacaacgccggatctgccattgtcgagggctctgataaatctcttgaaaattgttggataggaacctctagtcttatcatgcagccacctactatcacgaatgatgttgttgtcagaaaatccaatgcgtttgtgtcggcagatcgctggaaggcatgtgtgcaaatgtttccgacattatttccgggaggttgtgggggtccgacagaaaagcgcctcaatcctatttcagtggagcgatggatacaacgcctgctacatatcggggatcatcgatttgaaacacactatgcatttttgctcctcgcatttgattatctggcactgcaaagtgcaagacaagcatggcacattaaacttcatgtgtcatctgacgcgttaaaagcaggattgatctcccgtggtgtaattcgtcgctccgtggaataccacgcccacgttgttacagcagaagcgcatggaaagaagccaaatccacccccaaaagaggttcaacaggttattaacctacgtagaggtcttcgtaccagtgagacagcattttatggatcgaatttgagcagaatgcgagcacgacacggtcttttcggatatattaaacgttttggaccactacagctattttttacggtatcacccgataccgctgggacttatacaattgctgaacaatctggtgtactaccgcatcacgtaatcgaagaagccaacatgcgtcttttaccaaaccgtgctgatcggaagcgcattgccaacaaccacccaatgcagtgcgccttattttttgacagaataatgactattataattgatgtttttcttgggtgggatcgaaagacacatcaacccaagaaaggagggggaattttcggtgtggttcgagcatttggggctgccgcagaaacacaacagggtggtgatctccatgcccacttcgcggtatggttacacggatttcctaccacgtcacagcaaatgaaagaagccatatcttcgaacgcagcattcacacagcgtctaaccgattatgtttattgcatttcaacaacaactatctcagtggttgaatcaccaaatcgttgcttcaatgagaacgctggagaattgaaaccagtttcggtcggtatcgatggataccggaagccattgccaggacaacatgcaccgattacttcttgttgtcagatttgtaatgtcaagtatagagacaaagatgtgattaatgctgcgattgatattgctgcgcgtcgcaatgcagtaaagttatcacctgaaaacattgattttattagatgctccccaccgcgtaataatgataatagctcattgtcggcactagaattaagcctcatcgtccgcgatgtacaagttcactattggagccacgcaaatgcttgctttaagcctacgcgcagaacaccgaaagcatctgtctgccgttcctttaagccgcatgaacctagactagaaaacacttgcatcgacgacgggaacgatttgcagttgagccggccgattggatcagagtacgtaaatgcatacaatcgaacgctaatgcaaacgctaaaatgaaaccacgacgtgcagcttgtgcttggagccagcgctaaaaacgcagcagcatacatttgcaagtattgcatgaaaaagcaaaatcccatcgaaaacgaagttcgcttttcagttggtgtattcaacaaagctgtggaaaaagcagatcggtcaacccatcacactgcagaacggagagggtacaaattgctctcatctatgctatatgcgctgacgaacggccaagaagttgcagcaccaatggccggtttatatattcatcgcggtagtccattttggttctcacatgaacatacgtatgtgaacctcgaaaagatgctacagagtacaaattcaccgacagttgaaattacgatccctgaagatattaactcggattcaaacggacccgtatcgaatggtaaacgcaagctaagtatgtactggaaacgacaaaaagagttagataacgtcaattttatcactatttgtgaatggtaccacagcggaaagaaacaagacgccgatggggcgctacactttaaaaaaaaatgcacatcggcaacttttcatcatgtcaggaaagcaactgccagatcttaacgctaacacatctgatactgacagaaagttttactatttggtgcttttgacactttttaaaccacatcgagaaggtagaattgttgaagggtatccaaacgctgaacgcgcttacattgggtttaaatccacgtgctcagcccttgaacaaactcaaatgagggaattcgaagagaagtggatagattattacaggtctgaagctatagaaaaagaagagcaagaatcacaagaagacattctgcttcgcaaaaatctccttcgagagctccatggcagccctacgatcgagaaacagaaatagacaatgacaacttttccgatgcgacaagtggcgacggcgataatagcgacaacgagttagaaacatacgtggatcaattaatcagcgaaacattgtacacgtgtcctattgatgcagttcagaatttgcgctccacaatcaacaacacatgcgataattactcacaaccagcagaggcttttgtacccgcttacacatcattcgaagactacaccgaacatgtcacttcatacaacattaccaataacacatcaacaggaactagcgatttcattgcagcttttcctgaagccaagacaagattagaaagactccaggactgcttcgaagcagttccctgggggcctgatcaagccacagccacttcgataagttctatacctgcctttcctagcattgaaacggtctcaaagtcctttagcttcaacttttggcagcacgcgatatttgaaattgcagcgaggcatctcctatttgcatacttgtcagatatcaaagatgttttacaagtaccattatttccagaagattttgtcttgcagccctatgctatcaaagaacagcttatagcgtacgtcggagaagctggtactggtaaatcacgagtaattttcgcactactactatttgccgagaagtggggtcgagaaggaagcgttgaaacccttgcctttacaggagtggcggcaatgaatataaaaggcagaacaatacactccgcacgcaaccttcagctaaacggtacacaatccaactctcctcccagtttgcaaatgaaaaatgcttttcaaaaggtggtattagttataatggacgaaatatctatgacagatcaagggttactaggttccgctgacatgacatcacgagcaatgtccgatcaaccccacaaaataatgggcggaaagcatgccatgtactttggtgactggttacagttaccacctgtacgtggaacaccatgtaagttctaaccagtttcttattagtatcttcgttcgctaattggcaattcatatcattcccatggtcgcaggctttaaacctccacctctagcagcaagcaccgctaggaatgttgggtttgaagtctacaactccatcaactttgtcatctttctcaccgaaaatatgcgagccaaaatcgacccaatctacgcagaaattttgagtgaacttcgatggggtagactatcagacgctcaccgaaaattattaaactgcagagtatttacagacgcgcgacgttcagtgagtaaagctggtcgttctccggattcctattacaatcctgttcttgtcgccactaatgcactacgatgtgcaattaatgacacaatgacaatccaagcatgtacaaagactaacactacgatatacgaaatctcggcaaagccgacacctcgatcaaaggcaatcttcaacaaaatagttaacgcaaacgacgatgaaactgaccgaattccaatgaaattaatctgcttcattggtatgccagtaatgattacaagaaaacaccccgctctaaaagatgcaaacgttattgctaatgaaccaaccggaatcatagtaggtttcgcgcctccactacaagaatctgcatgccgtaataaactagttcatggcactatcgtaaaagaggtgcttaacccccccccctccccgacctaattatcattcgcgttcacgactgcgaaagcacattggtagatggatatcctccgggaactatcggaatatcagttcttaacgcacagattaagctgtcaaaattcaagaatctagctcgttcatcgatttcagttcgtcaatttgcaatagtgtcagccttctcctgcacagctgaaaaactacaagggaaaacctgcaaggatggcgttacggtaacgcccttagaaagaccaggaatgccacatcaactctctatgttgcactatcacgaacgacatcactgcaaaatctaacacttaccgaagatatcacacaagaatacatgcagcagttccaacctcctcctacgtatgtagccgaaatgctacggctccaagctctcatagatgtgccaccatatattccttctgaagagctcttaaaattcagtatctggctggagaaaaacaacatacatacagcaacttgaaaaaatagccgaatataaaaaatggacccactcgatcccgatctggaaagcgtaccagcgttgaagtcggcgtctttgctgttgtgaggggccgctactaatctgccatggatgtctgccgcgcgcaggctccaagatttgccataatgatcaccacctgcccccaagcttcggaacatacccaccaagcctccgagtccactccgacccaaaagacatccagcaggccttcggggtcagtcacggggtcattttatgtgacgtggacgtccgtctgccaatgagatggcagaggactcccacgtcaagtgctgctgcacagcacttcagtttacgctggacagcgtaatacggggatgcatggtttatattcattatatgctatcctattggctggtgtcaaaagtaaacttgattatgagacgcgtaaacatggacattcgcgcgacctcattggctgtaaatcctcgagatgtgcaacaatcacgttttccagccggacttttgattatgggacgcaagtcacaaattttggccaagctacgaataggattagtattttttcattggtagaaaaggattgatctaggatttgagattgatagactttaggatgggacctggatacttgtttgcgtgtcctggtcgccaagaactactggttgcgcggcggcggcgcgccgacgctaaactaacggatcaatcaatcacttttcaactttccaacttcctctcaaatgttcttcgagcgctcgccactgcgctcatcaagcttcgggtcttcgcatcggcttgtgtgacatagtagcacttgtcgtgtcaagcttcggttcaagttcaagactaggttgctcgtggggataccttccgaagcgagtttacctgtgactattggagttagccacatagtggggacactctatgttgcgaacgtgcagttttctgtgggagcacacttcgaagaagtgggtacatcacgccgtgggcaggtggaaataccacattggggcttggcccacgccaagaccggatagtacctaaccttcggggttgtgttggactcttactagaagtcggtttagtaacagggcgcctgctttgtgtctgctaacgtggaacattgtagaagtataacggtccctggttagtcccttgcctttttcgatctatggagtcggtccatggcccggtacaaaaagggtcataaccacagcagtaagaggaagcaccaaaaagcgcgtgacgttaaagtatcatctacgccggctcctcctcctgttacggctattgacaccgatctcttcttctcgccggtcgaggcagagaaatctgcgaaattgcaatcggatcttctcaagcaggtcaaaaccgctaagaggatcctggttaagttccgcaaagaggtctggggtatcaaggacgacagcgttgagggtaaggttgatcggcaactcaacttagctcttctcgaccttaagagctgcgaggacaacattgctgcgaagattaacgggcttatccgcctaaaacctcagaaacactaagctttaaacacacttttagcttcacttcgtctccgttttattgtaccgttttacggatcactcaccgaaaagtccatctgctcgagacctaatgcctgtgacaaggagtagggcgggtgagagtgaatggcctaacccgcggcagcgtcaagtgccgcggacggctcaaacggaggcggcaacgccacaagaagcgcaaagtgaagccccatcagcggggacgacaacccctgcgcctgagtcaatgtcgatgcagcagttgatgttgtggattgcacagcagcagcaaatgtatcagaatcagatgcagacccagttgcagatgcaaatgcaacaggccaacagtcgttttcagcaactactggcctcgcaaggtgaacgacggaagaaggatcctcccacgtatgaagggaaatttggcgaagacctggaactttggatctttgctacggaggagtactacgctaacaaacgaggaataatggatgccgatacgtccgattttgtgaccatgatatcaagcagtttaggcaagtctgtgctgaactggtatcgtgccttttcgtcggattgtgatgcggcgggaatgccgaaatcatggcaactgtttaaggcacagttgcgcgagcgctttcgcccgaagactttgaatacaacctgcgtgagcggttgtttcaactgaaacaacacggaactatccatgaatacgtgtcgtcgtttcaggatttgatgtctcaatccgagttagacatttcggaaatggagaagcgtttctacttccagtatgggcttcgtgcggagacgtcaaagaaggtgaaggaactcagtccaaggttcttacatgaggtcattgagattgcaacgaactttgagtttgctcactatggagggctatcggtaaaacctgcagtgagtcatcagccttcgtcgaaagcagtttcgtctgtgaaacctgcggctaacagtacggccaagccacaggaacgaaagccaccttcgaagcgtgggccgaaagaggattggcgaaagtcagccacatgtaacaactgtggacaattcggccatatcaagccacaatgtacgtccaccaaggagatgaaccattatgttggcggatcattctatgctattttggaagtaaacgctttagccttcaagcaggatgagaccccggcagaagtttcgatcttcgtcgacaatggcagcagcctcaacggtgtcacggaagcgttagccgagcgactacaattggaaatcacggagcatcccgacgacatgatgacagttcgtctgggatacaaccaaaccgtgcaatgaccaagacgtaccgtcgaaatgatgctacagattccgaatttccccgtgacgtgcgagacttttacggtcatgcctgttccagaagacaaggacgtgctcctcggaatgaagtggcttcgggagaataaccctgggaacgcttactactgcgtccacgtaataggaccgaggaacccccggcccatcagttggtggtatctaaccgacctcccgcacgtatgattggaggccgtcgtttcaagaatgcaaaccagaaccgtgaaatattccattactaccggcagcatggccacaccggtgcgttcggagaaacgaagctgatctcaacgaagcaatttatgaaagaacttcgcaaagggaagggtattgaagctgtttttgttgtaaacccgcacgactcagaaaaggctgagcgttttaagcaacaaggatgggaggcgctagtggacaatccggcatatgatgttttgctcaagtaccgcgatactgtgtttcgcactgagctgccgagtaccacacctcctgtccgcgaagggattgagcacgaaattcagcttcagccgggaacgcaaccgatttcggtgaaacagtggcgccaaagcccagagcagcgcaaggtcatccaagattggacgaaggagatggtacaggctggaatcattcgccctagcacctcggcattcagtgccccaactttttgtgtcaagaaacccgtgggttggcgtattgtgcacgactatcgccagctcaacagctctaccattttgccggccatacccatgccgaggaaggaagacacattcgacgcaatgggggtagttactggttctcctgcatggacctcttgtggggatattaccaggttaaacttcgtgaatctgacattccatttactgctttttcgacgcccgatgggctgtttgagtatcttgtcacccctatgggtttgagcggtagtcctggcacttttaaccggttgttacggcgggtgtttagcgacctacgcgatgtcatgcgcatctactttgatgacatctatgttttcactcaagacacagatgttcggacgcatgtcgaagcgttggacagagtactccaacgctgtcaagagcagcagctgcatgtcaagttgtcaaagtgccagttttgtgtcgaagagatcccttgtcttggtgattttgtgggccgcaatggtgttcgaatggaccctgacaaagtgcgtgtgattcgcgagtggccgattccacggacaaagaagcaaatggaaagcttcttgggtactacggtctatgtctcgcgcttttgcggcgacttcgcgcaattcgcaggaccattgcatggaagtactaagggtttgcgcccaaaggaaacgctgcatttgtctgagcaccagttggaatgttttcatgaactcaagcgccgtctctccacccctcccgtgttgcaacttcctgatttcgaaaaaccgttcggtattcgtatggatgcctcgaactttgccatagggggagtcttgtttcaaaacgagggagggctcgagcatccgatcgcattcactggtcgtgaaatgaaaccagcggagctaaactacccagcgcgcgaacaggaattgccggctattatgcatgcgcttcgggtgtggagagtctacctgctcgatcggccatttacggtggagacagaccacaagagtattgagactatattgacgcagaagacaacaaaccgtcgtgtggctcgctggtttaatgaactagccgaccaaccacagttcaaatggattccaggcgacagtaaccaatgcagtgtctcgaaacccactctttgagcacaaagccgctcaggttagtctcattgagctcattgaagcggctcgaaaccgtgaaattgtagctagcgtccaaacgaccagtgcaactgtgacgcactcggccaaacaactgtaccctacagatcgaagagttcaggagctgttgcagagtatcgctagtggtaaagaggtaccacgctactctgtgaagaatggactgctgtattaccaaacgagagatgatgaaaatgcacgactggtaattccggacaatgaagatctgaagaaccgtgttatttgtgaaaaccacgatgtggtcacggcaggtcaccccggatacttcaagacatacttaggcatccagaagaaatattactggcccaagatgtcgaagtacattcagcgttatgtgaacacgtgcgagctttgtcagcgaaacaaggcacgccaaacgaagccgccgggactacttcaaccgttggagattccaggaggcagatggattgatgtgacgatggacttcatggttgcactaccgaagacggcagccggaaaagacgccattatggttattgtggaccggttgacgaaacgtgctaagttcattgccacgaacacggcggcgacagcagaagagactgctgcgctattcatggccaattatgtgaaagaccatggagtgccgaagtcgatcgtctcagaccgtgacatcaaagttctggcaggaggtgattaagacattagagacgactcataacttgtcgtccgccttccgcccgcaaacggatggtcagaccgagcgtactaatcggtttattgaagactatctacgaggtgtcgtgaacccattccagaatgattgggatgaatacctacatctcgccgaattcgcgtacaacagacgtgtccattcctcgatcggtatgtcaccgtttgaggctgatctgggttatgtgccctatatgccagatgaggtggctggggaccaagagtttgagcagttgcagaagtcagcacaagatttcctgctcaagcaagacgcaattttgaaaatggcacaagacgcgatgagtgaggcgcaaactcgaatgaagtcgtatcatgacaagaacagacttgctcaagacttcaaacccgggaatatggtacttttggatggacggaacttggacattcgtcacaaggggtttgcacaggcgaagaaacttgcgccaaggtttattggtccttacccggtcgtgaagcaagttcatcacgactcctacgagctgaagttgtcgaaggagctcaagttgcatcccgttttccacacttcgttgctcaagccgtatcgcagcgacaaatcacgcagccaaaatgttaacaaggtgatcttgaatgatggctcagagggacaacttgtacgtgaagtcatcggccaccgtcgcaggaagaagacgctccaatatcaaatttggtggcttggtgaaccccgagaagacgctacatgggaacccgtagagaacctgaatcagattccagggctcattgacaagtactgggactccaagaagaagtaaagtgcagcttcaaagtagtggggccttcttggaagggaggtcatgtgacgtggacgtccgtctgccaatgagatggcagaggactcccacgtcaagtgctgctgcacagcacttcagtttgcgctggacagcgtaatacggggatgcatggtttatattcattatatgctatcctattggctggtgtcaaaagtaaacttgattatgagacgcgtaaacatggacattcgcgcgacctcattggctgtaaatcctcgagatgtgcaacaatcaagttttccagccggacttttgattatgggacgcaagtcacaaattttggccaagctacgaataggattagtattttttcattggtagaaaaggattgatctaggatttgagattgatagactttaggatgggacctggatacttgtttgcgtgtcctggtcgccaagaactactggttgcgcggcggcggcgcgccgacgctaaactaacggatcaatcaatcacttttcaactttccaacttcctctcaaatgttcttcgagcgctcgccacttcgctcatcaagcttcgggtcttcgcatcggcttgtgtgacattttagccgccagcgcgttcggggacgacgtccacaacctgccaagcaaccagcggacgggtagattcagtgcgagcagaacgtggcgagtcgagatgtccacgtttatcatggacgcgatggagacctggtggtccgctgatgttcgctggcgtggcgcatgtcatgttggggttattctgccctaattgccagctcaaaaggcacggcctcaagcatgctgtcagctttccgaccgaaaccacgatgactcctgaacaagctggagaaagttaccgactctcatcgctcatgtaccagtgcatcgggctcagtttgagcgccgacaggtctagcaacatgcagttgtatcggtaaagctggtgttggtccgcagcggaaagttatcgcccacatgcagtaggttgttttctccgcgcctaccattcagcaacagcaattgaaatagtgatgctacggtaacaaatccggagtaataatgaatcaccttgtattatcgtgctttgcatccagtatttagtgcactagttagtgttcgtatttagtggtaaatcatagaggctttgaatgcaagttgctcaagtcgtgtttcaagctggtttagctccgaaatgacactttctaggggtgccaaaaggatgctaatccgtactggatgtgctagatcatgcaggagatggtgtttccgcactacttagtgctgattaaccatccacgacttacagcaattcatacctgagtacaatttatagataagtcgtgctcgataagtcgtacagttacaggccaaactcgcgaagaagtctcgttggatgacattatactgggttgcaacaactcacgcaccatggagtagaccttgacagtttttcttcctgatcgtggggcgagcaaaaaaagatcgtaacagaaatagcgataacaacatcagtagcaaagctattatttaatagcggttgcagtagcggtggcattgacagtagggcagttgcagtggtagcgggcagtgatcttgacgcaggcgaacaattccaatagcattttactgaataagaaatattaatacttcgtattgatattacttacgcagcaatgcaagtcacatatactatttagaaaaaagagagtgatatacaaagcctagacgaccgataagaagttaagatcatcggtaatgcttgtggggacggcgatgttcagacggcatctacttgtaaatttagcttgcgccagccataagatggccagcgatattatgcagcaatatataatagaaacatgaagtggattttggcagtctttctccggcgtgaagaagaaagcaggggaaatatcattgaaatatcattatcatagctgatatcgtagttgtagcgcaaataacagcggtaacggcagtgccagcagtggcagcagataatacacagtcgcagtagcgatagcaggagatatgaactagcaacttcaatgacagcattactatgatatcattaacaatagtgaaatagtagttttagttgctgtagttgcagtagggataaacagtacttagtaacagtgaccagtagtaacgcccgccacagttagcaatatcaaaagcaatttctttaacaatagtggaatttcagtagtatagcaatagaagtagtaatggggtagcagtagcagtagcagcggtagtgacagtggcagtgtccaatagcagtgacagtagcagccgcagtagctggcagtggcggcgacagtggcagttgcaatcaataccaatagcaacatgatgatgttgtcaacatcaattataaccgtgtttgagaccaaccgccggatatgctcttatagcatctctagtatgagaattaaaatatctagtgcagtcatatgaagcgttacaggcatagtactcaccaaaatagtggtgataatggtaataacaataacaagtgcagacagcagatatctgctgaggcgcagtgtgtcctagccgtaaaaaacgcaaaattgttcggggcgtttgcctccgcttagagacccgcaccccagttcattcgaaagaaaatcatgcccaggttttcttaccgcaatggatagttcaccctcaccgccatttctacgacaccattattgtgattggctgaaagcccgtgtgggtctaggtagcgaattccctccctccctttcctcattccagaatcggccgcctcgagataagatggtgaagctgttctgtgcgatcgttggtgcggcgggaagcgcgttccctgtggacatcgatgggggccagtcggttggagacttgaaggacgcgattaaggcgaagaacccggcgacgatcacgggcgacgccaaggacctgcagctcttcctggcgaagaaggacggcgcgtggctgaagtcgaaggatctgctccggatgcggaagggggagatctccgatgaagttgagagtctctacatgaaggaggaattggacgatccgacggacaagatctgcgcaaaatttcccagcacaatccccgacggaacgattcacgtgctggtggtggttccggttggtgcagttggttcagcgagcgagacttccaggacggatcaagtggtccaagaggtgcacgaaattcatgcgcaaactgtgctgaccaagcgcaagacatatgtccactcgaaggtgggttcgaccgagtacaaggaacttctggacgccttcaacattaaggtgcaacctgtgcgtaaagctgctgctaagtggggtgaagtcaaggggttcacatgggacatgaaactcagcgaggagaagcagaaagatgaatatcgcgagtatgttgacagcaacattggcgagcttctccaggaggagaagctttgcgtgttcggtgtggaaaatacgacagatattctccgagttgttgtcaacgactccaacattgagctccggggtcgcaccgatcttctcatactcagtgatatcgtcatggagagcgcggattatgcgctggacttgcctgaagtgaagatgctgattgaagtgaagaaaaaggttgaaagacaatctgtcttccaggcgatgtcagagctaattgctctggctctgcttgccgacgacccagtggttgcactgcttactgacttcaacggcgattgacgattcttctgggtcgccgggaaggaaaacaataccacttgcgtcaacaaagtgaacattacgaatccaggtgaagctttcgagttgatcaggcagctactgaagcctacggatatcatgaccccagtgcttcaagaccctgtgaagcgccagaagttatcccgggtgttgccgtccatcagcgaggccagtgaaagtggcgggattcgtgagagcatcgaacgatactatgacatcgccagttgtttaggccccgacttggacatggcgcgtgctgtggctagacaggtcactcgatctattcccacgttgagttatttcagctaattcttgctttggcatgctgcattaataatttttttattctgataaatataaagttaataatatacaaagatgacttactctcctgaacaataccaagctaacaaagagcgcattaaggcagctcaaaagcgatactacttgaagacgagagaaactcgtatcgctaagcagaaggagtacgacgagaggaatcgtgagcatattcgtgcccaaaagcgtaaatcctatgcagcgaagaagcagtgcgaacctaacagtgaaaccgaacttagctaattaatttattattatttttgaattttgtatcagggtagatataaaggcgatctattctgacataagatccataaattataaagtcgatctatcctgatattatatagtcggatatatatagcaaatatgtttgcatacgagttagaaggactaaagcgattaaatattcacccaatcaaatgggggagtagctatcgagtcaagatccggggtaaaaccggtagaatgacatatattagcaatctatcgcgccccagcaatcagaatttgattgcgaaacagtacaaagtttccattgaagatcttaaaaagcatatgtcgcctgagtataaggctgatcctaagtatcgcttttatgacggtaagcagatagaatctcatctatatgaaggtatccaaccagctgagttctacgacaagcttgagaacgtacttaccagtcaaaagaatgccttcaaggttaatatcgctctcggctacgaccttgtgagcttaaccggtgatttgacacagtattggcatccgaatgtatccaatacgagtgtatttaacacccctattgatagcaatagcaaggctgacatccgtaagaaagtaatctctgagatccgttcaatggagttggcaaacaagctcaactatccaagctcaggatacaagctcaagtctatcactggctttagaatttacatctatcatcgcaaccatgctcttggggatagtgatgcggtcatccctaagattattcgtgaaaaccatcacgttatcaatttccccaagactaataacaaatgtgtcttccattgtattgcctggcattcaattcaggaccctaagaagaatcctcgaagaattcaggctcaggtaaaggaggcattcaaacgctactgctctttcaagggggttaaatattcgttgaacctgtttcgaagcttcaagcccattgacctactccagctcgatgatgttgaggaatgcttcaaactcagtatcaatgtctatactatggatattgagtctgggaaggttgaatgcattcgtcgctctgacaatgagtatgaaactatgaatattctatcgcatgagagtcatgctctatatatcaagaatgttgatatgctccaaagcaagtaacaatgcaagaagtgtgaaatggtctttgtcagctccacgaagctcaaggatcactctaagaaccaatgcgaacgagtaaatattgaaagcttcccagcccagccaacgatctaccgacctgctcagaacacgatacgatcactgcaaacaaaatactccatcaaggatgctgatcactatatcgatcatttcatggtgtatgactttgaggccattcttaagcctaccgctactcaacacggggagaatactgtctttactaacgagcatattcctgtgtcagtatcaatagccgatagtttaactgatgaggtacgttgctttgtaaatgatgatccaaaagcattgcttactgatatgttcaaatatattggcgatgtatccttaaagattcgacagtacaatgtctccaagtatgagtctctgttacgaaagatcattaacagtcacggtctgacgggtatggagatccccgacacccctcttggtaagacatacaagatgtctgacgtggagagttggattggagaaggaaaatattccagtttcttcgatttccataacaaaattggattcgctaagcagagatcagattatggtaaaatcaagcagcagcttgatcaggtaccagtatttggcttcaattctggtcgatacgatatcaacttgattaagagcgacttgttcgctgtgattggtaccaataacatcaaatctgtcatcaagaatccatcttacgtgtgcatagcaacttggaacatgaagatacttgatatcagcaactatgttccggctggcaccagctatgacaagtatttgacgacctatctcggtggatgcaagtgtgaggacaatattagctgtgtttgtgggcttgataagggtattttcccgtacgagtacattaccagtttcaacgtcctaaatgaaactcaagtcccaccgaaatcagcttttgacagcaagcttcgtggtacaagcatctccaatgatgagtacaagcgtgtgaagtttgtctgggggcactttgaaatgaagtcaatcaaggatctactcatctggtacaacaatctcgatgtagttccattcatcaaggctatccaagctcagcgtgagttgtttaaacgttttgatctggatatgtttgtcgatggtgtgtctctacctggtctatcggagaaatgtaccagacttgcttcaaaaatctacaataccccagcaagaagcctgctaaagcgttcaaattcccagccaagcgtatggttggctacaagaatcaggatgataaggcaaagcgagaatttggtatgacacttgatcacttgaatagattgctaaagcatcagaagtacatgtgtgctttgtgctacagtcagctgacttgcgaaactgcctctgctgatagaatcaacaacaagcttggccacctcgatgggaacatcttgatcagctgcatttcgtgtaataccgctcgtaaggatatgtctctcggggattttcgatacaagaaactgctcgagttcaattcgaacagattggtctattcgattgacaaggaggaatctgagatatacggtaagatgaaggccaacatcgccggtggaccatccattatcttcaaccgctacgccaagcggaacgagacaaagattcgtggtggtaagctctgtaaaaagattatcggttatgatgccaatgccctatatctatgggcccttggtaatgagatgccgtgtggtcgattgactacgattgaggcttaccctggtatcatcgatgacatcaagaatgacaagatatttggctttctcgagtgtgatattagaaccccagagcacctgaaagagtattttagtgagatgactcccattttcaagaatgctctgatagactgtaccgatgagagtgtcattggcaagcatatgtttgattacaaccagtctcgcgaagcaaatcgttctaagcctgctcgcaagttgattggtagctactttggtgaaaagatccttatctatgcaccgctgctcaagtggtacctttctcatggtatggagatcaccaagacctacagctttatcaaggccagctctcacacggcattcgctcctttcatggaagctgtgtcaaatgctcgacgagagggtgatgaggggacctcaggggcgcagtccctgggggtctccgactccaagcaacagcttgacgctgataagtctaaatctatgattgctgagatgatgaaacttgtaggcaacagcgcattcggtcgatctggcatggatatgagcaagcataaggaggtcaagtatgagtcggatcagaaggcaattgaggcaaagatcgaacatttcacgttccatggtctggaggagctaaacgatgcttgtgaaatcaccatgaagaagagacaaattaagaacaagaaccagattcatctatcgattgctatctaccagctcgccaagctgcgcatgctccagttttattacgattgcattgactactacttcgatcgaagcgatttccagtatcaggagatggataccgattcagcgtatattgctttcagctgtgagaatcctttcaaggattgcatcaagcctgatctacgcgaccatttcaagccgtacaagtatgactggttcccgcgcgactataactctgaggtagctaagtttgatcgtcgtacccctggtttgttcaaggatgaatggacaggtgatgccatggtctctctatcgtccaagaactatatttgctatctgccagatgagtcctacaaggtcaaggtttcagccaagggtgtgcagcaggggcgaggtcgtaatgaggatgtactcaatccaaatggtttcgagactgttgtacgggatcgaatcacactccaaggtacgaacaaaggattcagactatcgaaggaatctaagtcaatcatcacatatactcaaacgaaaacagctctcaactactattacgacaagcgacaagttctctcagacggtatttcgactatccctctacaaatttaagtactacaatatataagtattcgtagaatactctttagtacctacggtacaatatatcatgtccgaacgaagttcgaaggggcttggccccgcgaacaagttcgcctgggcgtcagccctgtctaagctgctaacaaaactctattatgacccaaaaacaggattcataggagctcaagcactttatcagaaggctcacgagttagatcctaacataacactaaaatatgtaaagggttggtatgctacccaatcagatattcaacgatttcaggagcagaagaagcgatttgatgggttcaagattgcttcacatagtcccaactcatggcagatagatctcgcgttctgggacaagaaaccaatattgactgctatcaacatcaactctcgactcggttatgcaaaagccttgtcaaacaagactgcatcaactgtattagcagcgcttaaagcgtttgtccgcctccataaggtggatatcattacaagcgataatggcagcgagttcatgaactcacagactcaagaattcttcaaaagcaaaaagattgagcacttcaacaacgagcctggtgatcatcggacgatgggtaaaatcgagagattcaatcgaactataaagcagagactaaccaaaatgtctccgaagaggctcacacagaaaattatagctgatgttatcgataactacaacagcacatttcatcgctcgattggtatgaccccgaacgaggcaagaggtaaagtaatgatggcggatctgaaccataatcaagctgaagctgataaggtcgagaacgcgtttgatgttgggtcgaatgtatcgtctcaaaaagaaaacatttgataaggaagctgctcactggagcaagggtatttactcggttatcggcattgatggttatcgggttgagattcgttccagaaatgggcatacgctctacaaagccccgaacgatttaaagattgtgaaagcagatactacagatgctactatcaaccgtggcgatattctcgaagctgagaagatattagcccataaaaaaatgaataatggcaaatataaatacctaatccgatgggtagtaggcagtgagcccgactcatgggagcctcaagataacctacgcttgatcaataaaaataggagaagcaagcttgaagaagattatttatctcacatagccaatatataggctatatatatagacaccatattcaatatggcttgccaagcaacgaccaagtccaacaaaccttgctcgagagatgctctacctcgtggttattgtactcagccctcaaaggactacaatattgaaatgtataagaaagaactcaaaaagatgcatcagcgaatgagattctacagcgataaggtcaatcaaatcaatcatatgctcaacgatatctacaggctcgactatatcaagtatcatcttcaccaactcgaccccaatcgtccatatcgttatgtatgctctgatccgaaatacaaggatcaggtcgaagatctatttggtttgcctatagatgaatgtaaaaacgcgtacgtcagattgctccaaaggcgtaattcgatcgttcataaatttactatgaaactttgggagtcgcgggaagatatacctaacaccacaggtgaagtcgcagtcgcagactggcggcttcgccacacgtctgagcgaccgctcaacattgaatataagccaaaatttcgtaaataatatcgagtttgatatatatactaatcgatatgttcccttcattcacgagtctatccgatcgcgagcagaagcggctcgatctactcgaacgcaccaagcttcgggttaaacagaaagatgaagctcgccgtatgtatgctgacgcttcatgggccacagacgccgataaaaccatctccctcgagaagaaatccgcaccacacgtggagtcgcagtcgcagactgccggcttcgcctcacgcctgagtgaccgctcagcacaagattcttctaatcaagctggagatggtgattaaaaaaaaaactctgaagtagatgctacaatccctgtagttagcgataccgcgacagaagatagaacaaactctcaggaagtccctgaagttaaaactgatggttggtcgaagaccgcccgggaggggctacacccgctccctgataaaactgaagaattcattgcaaaaaaatggatcaagaaacgctatcagtctaatccaaactggatcgctgttaaatttaatccaatcaaaaccaataaaacccaagatatgaggcgatatattggaaaaaatggaaacctgttcagtctcaagacaaataagaggtcagattctaagtacattgactgggtactaaccgcaactgaactgatgaatattagatccgatggagaatcgaacagtattgatgaagtcagcttgatgcgcatggaagataccgatactccgaatcaattatacgatataactggtagtaagaggcatagagttactacttcaaccaaaacggctaacaaaattcatgtgcaaccaacatggtttcacgatgcttcttcatcgactacaatagatgaggaacaagctaaatcaaagctcctattcatgctgaaggcttacaagaagaaactgatcggctctaacatcgtcataaggcctgttttaaaggatggagaagttctagacaaatacgaactaatcatcgactctaagggcgatctcaacgttagaagccaagagacgaaaaggaataagcattctcgactatctgatatctcttgggtatcaactctgtcattgtttatcgagacggttaaatcacgaggattgacttttgaatttgaaccatcaccagacactgttttagatagtgatcctgaccggtttaaatccacgcaaggtatttggtataaggggaagctgtcaggaccaggtgtcatggaggacctatctatcccagagactgaggtgaaggcaattatcagcgactactatatcgaagcgggtaaatcagatagcatcttcccaattcatttgcttccgatcgtaagtgggaatccaaataaaaaatactatttcgccgttattgatggcaacctacgacttagaaaactggactctaagtcaaatgcacccctatctggtaaagctcataccagctttttcaagcgtatccaatggccagaaacattgaatctattaatggattaccttagagagatggaatcgtttatccactctgatcacgacgttgataatgcaaccaaagagccaataatgaatgctctcaagctgtatatgtacgttttgaaggcacatggggtaacgattaaagagccaaccgttggcggtaagctcaagggtcgaggccttcgcggggctggcatccagcctctcgaaggtgttttacgaaaaacaaatcaaacttacaacttgaatgatttttaaggtaaagcaactccttccgcttacatatataggaagcttggcagtaagtttatcagactaccagatctcgacaagagaactctcacgatcgttcagccaaatcgacgaaaagtaggcccaatgcgtgagatcagtgatcctctacaagccatgatcaaggatcttgtcttcagaaacgatatcagtcaggagaagtatgataagctatctattgatgataagaaattgttcaaggaaatccttgagatgacacatttgcaatacagcttcgatcataatttagaggatcctcttgattccctacgcatggagtacgataagctcaagggcgagctgatgcttgggaatgataatccaacgattctaaagcagttgaaggtggtctgtgtcgacatgtatagcaatcgattgatttcagattctgaattcaaatcaattatcacgagactattataagatgttgattcttgatccaagactgatttccaagagcgcaggtatctatcagctcaatgccgataggaacctcactgagcttaagcacctgatgaaggatctcattatcaaggaagctcctcaccaagatagaccaactgtttgggcgagcgactcaaagccattctccactaagtcagtagctacgcaaaccgaagcagatggaggtcgtatgtgggcatacaaaccaaagaaaaaaatgagcaagcagccaaagacgtttgctctgtaagcctcctgaatatctgagctccaagggagcgatttgaccgaaggccaagagctctcacctcgagaccaaggtctcttgctttcaagcaatagaatatctgagctttttcaaagcgatagaataaagtttttttgcccgaagggagccgctacgcgggctcattgatgccccttatcctctagagcgtctaaacgatttaggacagattggaggcattcatggagtaagcaagcgatcttatcgtaatcgagagttaattgatacccagccatgtctcctgcctgctctatctgcaaagaatcattttgaatgaaagagatacactcgactgcatatttggctacatcctgagctatatagccgagttcttgtctctctgaatttgatttatacgcgaagagtttcgggcaaacgtttcgaatgaatgcagtggtatcatcgatatcttggatattggtctttaatcgcctatcactggttgtataataggacccactacttacaagaatgctgttagagctcttgattgaaacggcgacgctgctcactggaccaacggtaaatgtcgtactggttttagacaattgaccatagcctaaaccaccgctatcgatagtttggctcacggagccagatacatctaattgcgctgctggggaagttgtaccgataccgacccttccagcgttcgttcctcccagaatagtcattcgtgtgctatcgtttgtccccaatctcaaatcgttattggtcatcgagccaaagaatacagaatttgtagaagtagctgaagttgagttatgacattggatagctgctctaacgcctgagttgccatagaagtcggcaaggagactaaagctgccatcgagccatgtagtgttatcactctgtatcgataaccaactactttgattagccagagtctgattgatagtgcctccgctcactaaatgaacactatcggcatttagagtgcctcccaaccccatatctccagatacaactaaagtgccattggtttgtgtagttgatgaaatagccgcatcaaataagaccttaccattaggaatccaaagtgaataagcattggtaattgtcatattagttcctgctgtaggagcattagcaatatatactgttgccgcatttgtagtagttactgtagcattagaagctgcaatagttggttgagcaaatgaagtaatagtagcacttgtcgctgtcccagaagaagctgtgcttgtgtttgtataggtagtagctaatgagttgtattgaatacctgaagtagtccaagatgcagctcagaccaccactaagcacttagccaccagtgcttgctaatgtagataatgtgttattagttaaagaaactattccagaagcattaatagtagtaccattaagtgttccaccaataccaataccaccagttactactaatgctcctgttgaagtagaactcgaggcagtattattggtaaaggtaactaacccagatgcaccaatagtagtagcgccagaaatacctcctccaagagctaatgatgtaagagtgcccacagaagtaatattaccttgagctgcagtagtcaatgtaccagtaatcgacgtagctgttaatgaattaatcgtagcaatatttttacttgaatccagaataattgccttggaagccgtagcagtgccagcagttactccatcaagcactccaatttcagatgaagatatcgttattccactcatggttaaggaaccacttgtagtgattgaagtaagcgtacctactgaagtgatattggcttgagcagcagtctgtagtgtaccagttaggttcgtagctgataatgaatttatgcctgatatattgctcgaggaatcgagtacaagcgctttagatgaagcagcagtgccaggagtaatcgataatacatatgtcggaggagctactattgatgatcctcctacggtaagtgatgaacaacttagtgcccccaacccgctaagcgatccatcagaagcaacgacaagggagataccaggtgttgcaatccctggagtgattcctgtgatatatgataggcgatagtcgcttcgtccgagatagagcgtttgagcatatgcatatgttaagtatcaactcggatcgagggagatgtagaatgccggattgtagcacgatgaaatgaatgtaggttgaggataactaaatccactcatagataagctattcgactgaagtcgaagtttagtggcgcgctaatatttcttcaatcttatataaggcacgattttttcttagccatgtctgcaattcccgattatggaggcagtctccctaagaagtatcgagctgattcagttggaaacatagcggagttaggtatcaagaagctttttcgcatggttattcttggaccatcgttttccgggaagaacaacctctgttatcatattctcaagtcatctccgcatgtatttagtcatcttcatatcattgctcgaaaccctcatcaggatctatatgactatttacgcgataagcttgagggatttatatcattttacgaacctgatcaaccgcctaaggtagatgccatccgacggactcctggcgataagccagagcttgtcatcatcgacgactatagcaacgataaaaaccttcagaagaatgtattcagtcattactttaccagaggtcggcatttcaaattgagtaccatatttctaagccacagctggtttgcaacggacaagatgattagattgaatacggaatacgtcgcgatcctccgagcaaactctcgtcgggatttgaagctactcatcaccgactttaatataccaggtctgactgaggaaggcatccttcattattataaccgggcgattgctcgaggaaaaggccagatgctctttatcgatagtgtcaagggtcaaatacgctataactttgatacaccaattaaaattggtgaaaattattaaattgataatataagcgatgagttcattcgttaagatagaccaaacctgtttggttcaagatgggctcaacagtcgatgggcctatacgttccccggatcagcgtgcaattttcaggatgttgaggcttctatccagtcgatcagtctgtataactcggaattcaatgtcgattcgattcagttcgccaatacatcgtttcagatagaagtacctaccgctgcaacgacaagtgtcattagtgtcaatctcgttgatggatactatctttacacagacatcaatagaaatactcaaacggctctcgtcaatgctggggcctatctaatcgactctaatgggaataatgttttctatttacaaatcgaagagaacagtacgtattacgcatgtcagctcgattgctcgccaactccaacgtcgctgcctaccggttatacgagaccaactactggtttatactcgagtggtggtactggattgcctactacgactcgtgttcctcgcttgatcatcaataatgctgcgtttggaaacctgttcggctttacgtcggggacgtatccaacttcgcctacaacgtcagctacgagtctgctaagcaatactattccccagatctcgccaacgtcttcatacgttgttaggtgcgatcttatcaagaatgatttcgttgcatcaggtgatatcatgagtgtatttgataaaggggattcaacaattggtaagcagattcaatacttcccaagtcatgagacttggtgtcgtacccacgatggaccaaggagtactgttagcatcagcatctggaatcagaatgatcaaagagtccatttccgcgatacgagcgttaatattatgctactcctacgcaagcgtcgagcataaaaaaatgaagtttttttcagcctttacattgtgaaagatcccccgtccttgttcttacgcatagcacgaagcttagccatatgagcctttgcttcaggagagccctttgcgaatttggccttacgacgcttgccagctacacctacaccgaaacgggttttgatacctctacgaacactatgaatcatttcgtgatgctctggtcgatcagacttgctgacaagatatttctcaccttcgtcgattagatcagtgatgattcctcttttcttagcatagcgaagagcattgcctgcatgtcgttttacatctaagaaactgatacgtcctccttcttcatcgctcccataaccgtccaatcctactccagtaagcgatttaagaccagctctggctgcaatcccagcttcaggagcaccaaatgcagtagcaacagctggaacagctacgtcagctgccttcgatagcaacccactatccttagcgaacttaaatccagatttaattccatgccaaatttttgaccaaatagatccaccctgagctcgcttgtagccctttttgatttcatgcttagttatgtggagtcgaactccacgtccggccttcttagctttgagagctttctcatgcgattcaggatgtaaatggatcttagctcctgacccttgtagctctgctgctgtaagggatagcttaccagtattggcagcctttcgtaatttatgggcgggaacaccgctcgagatgataagttcgttatacataatttgttgattggggacaacgtttgcgtggtagtatatattaactcagaactaatctgcaacaaaaatatttaaatctttgaatttattgaatagatccatccgattgttctgctttgcatataaccatagcagcgaccaaataccacaataagagccgtgagctgattgagtttgattctcgttgtatttgctgatgccatatttcttcggtggcccttctcccattgaatcgaaatattcatggttatatacacctgtccaatgacctatgtcttggctcggcttacgtagtagaatcaggaacgatcctttccttggaagaggctttttgatctcgcttgactcataaatgtggtcaatatgaacattgagcttcttagctaaagctattagatcgtgatctgatgatattggttttacaagattcatttaattatttttaccaaagctatattggagtgtatataactgaatcaactatgtccgatactcagctcgctgatcaattcctataccaatcttcgcttaagagcgatccggccgttaaggtcagctctcgaaagcgtgtgccgtacatcatcgatctaaaccagggttcgtatgcgaatggtattattacgattgatgctacagctcagcttaatggggctgagggatttgcctgcctcagagatgcctacgttgtcattccgtacaaggtgagtatgaagaatactcatgcttctactgcgcttgctgcggctgccaaccgactgagcgttggtctcaaatgcggtgtatggaatgttatcgatggtatgtcgctggagcttaatggtaagagctgaatttcgatgagtgagtataagctgtttgctaacaaccttcgtgctcaagcagagacctcactcgactatgtaaataagcatggtgctgaggatttcttattccccaatagctctggctcgttgttattctcgtctgctacaagcagcctgtatggtgatggttattcgaatacggcttcggatatcactcctgctttgggtacggcttctacaggtgctggagttcttgcatccaacgaaggcttcgtaaagcgtcttctatccaatccacctacagcaggcggtcagaacactaacggttgggttagtatcgcttctggagctgcgaacactattgctaaccagtttgggcgaggggccttcgtccccggtggaactgctgctgctgctatcgcaggtacgtggaattacatgctcaagatcaagttggttgatctccacccgatcttcaaggagcttgatctcatggctaatcctcagatcaagcttcgtttacgcgtaaatcagggatcggccgtaatcaaccttagcactactaaagctatgtcgctttcatcgactacgcttgtttctggtcaatcatgcccgatcatggtagcctcttcggctgggtctgctcctaatagtggagtatttaatgctacgaccgcaggtcagatctcggtggcatggggtgctattaccaattctcttgagccaaccattgatagcacctatttcccttttactactactcgtctgtacgtaccattccttgatctcgaaaatcctcaagctctgatcagcaagcctaacaagactgtccgatacatggattactatgcgcaatggttctaccaacgcgcaggtactggcgtcagctctactcagctgaacactgcattcgatctacagctgtctgccagtcttaagaatgccaaggtagttgctcttctaccgtttgctgagacttcgtctggaaatttcaatagctctactattcagcagttccagtcgtgtttcgatagtgccccttggactgttcagcctggttcgtcgattcgcaactttaatgttcgtattggttcacagcaagtatttgatatctcgtatgactacgatttccaggacttcatcaatgagttcgctaagcttggatcgattaatggtgatctaactaaggaactatcgaatggtctgatcgattaccaaacctagcagcaaaccaatcgtgtgcttgtagcagacgtatctcgtctgaccgagaaggatgttccacagagcatccaggttatgggaacgaatgcttcgacacagggttgcaacatgcttgtactggttggctttgaaaatgagatgacgtacaatcgattgactggagaggtactcgaatatacctctaactaagctatcgtttgtatgatccgataactatataatcaccactcttcagcttaattctacgatcattgctttttactatgaggagtgtttttcctatcccacgagcgacttgcttaacttttagatttatctcaacttgggacacaagtaattctaactctcctctatctgttaaactgttcagacttaagccaacgattgattcattattccttagatcataaatggtcatcttgtagcttgtattcgaattaattaaaattaaaatatttcctgctggctatgtatatagatacagtcgataataatcatgaatttagttttaaattttggtaagcataaatccaagacgattgaagaagtgtatgcttctgatccaggctactgtcgttggttgtcgaatcagaagattctcattgattccgagcctggcattagtgattttctcaaagctaaattcatcaacgatgatgggtcattcttaatgacttggggcaaattcaaaggtcgaacgatcaaacaaatccaagcaatcgattccaactacatcgaatggttgaagaagaatgaattcgttaatcagaagatgtctaagctgaagggtgctcttgatgagctcgcctaagctgatggtattttttttgaaaaaaaatattctggaattcggattagcttgaacgagcttgtacccaggtcaattcttctacggttttcgatctccatgaatgaccatgcaaagattcaggcattgatgttgtccacgatttatgtctcttagtttgacaatgatgggcatagttccaccgtttgcctgcgtagccacaaggacacgaaatgtcgtggtgaagtctcgctttaaaaatgttcgtcatcattgcctctgccttttccacgtttgatactactatcgaatgcttcatacaacgaacttttgacggagccttactacaaacatttccgtttttcaatacaaacatacacattatcttagttatgatgatattatatacttagtagtttatttgtcaggattaaacgtcatttaaagatttgcctctgaacagttgagcggttccgaaactatcctcagatcctttgagtgcgtcctttcgtgctaagttatcgagaggccgtgccgttgaaatcaatagctgagtattagatgtagttatcggtggtgaaaccatccttagaactaaaggaggtctgctttcactctcagctgttgagaggtgttgtcgttgaaatgatcatttgatgcatgtgaggttggtgtcgctatatgcggtgcttgcaggtgataagggtgttccttctcaccagagggtatgcatcgttgaaataacctctttcacggagaacgttctacgactgttctctatggtaaattacggggagaaaaaaactgactgggttttgttccagtacccactacttgcgtgttcccagccgcgcttccagggttctacgagctcgaggtgagtctgaacgggcatcgccgtcctgcagcctgccatgaagcgcgccgtgttgagagctcacttgtcattttttacttctgccaaccagtaagaacgccaagctacaaccgtctcctcaaaacaccgtgaagatctccgcgtcagctttgatcgggttcggggctcttctccacgttgctgaagtttcggctcaagcgttcgcagctccagcctcggtggcgatctgcctgtcgttgggccatcggatgcacccgtgtcgaacgagaccatctccagccctcaagcttcttcggcagcagggactccgtccacccccatcgtcggtggtggtggcaattcatcgatgcttggagcctcggaaccgccgagctacctggttgagcacacggacgccatgagtcctcccaagtacctggattcgtcggtgatcaagaactgcgccatcccgaccaacaactgtagggcaacatcatcgcgcacgactcgaacgcggccatccagcctatctggccgaacccgtactcgctgcagatggtggtcgacaacgcacccttcggcatgtccgtgagctacccgtatcgcaaccgcttcagcggcagcagctccggaaacaacggcgccgtcaagttctacgcgcacggccaggtccgcgagttcatgttttctgccgtcgagatgcagcagaagcccaacttccaagtcgtggactgggccgatcaaggtgtgaccgtcaagttttcggccacctcgtgtcggacctcgtgtcaggcatggtgtacacgtccatgaagtactcggggctcaccccgcgcctcgtgtcgagtgctgcgatctccagcgtcaacggccagccgcttggtggacaagtgcgcggctccaagttcgtgatcgcgtacaactccggccagaagtgggtggtctacgcactctcgagcgacggtcgcagtgagcaggagatcactctgactgctgacggcaacattgcactcaagagcactgcaccgttcgacttggcaacgactcctggctgagcacaagtcctgcgtcgtgcaggccgccaccgtggatctgcacgacgacagctcctacgcgttcaagtggaagactgctccgttggtctgctgcacttcgcgatgaagcaccaggtcgagtccatcgacacgagcgccggggcccgcaaggtggacggcatgattgcgtactcgacgactcgcggggcgtaacaggctttcacgacgccgggcggctcggccgaccctgtgtgggagatcaaggagacccagcccgtacgcgaagacttctacccggcccgcaagatcgcgtttgccgtggctcagcagcagcgcttccccgaccacctgcgcgaagacatcaacgccgcgtggtccattccgcttgacggcagctactacttcaacggcaaggctgcccagaagtacgcctccttgtgcttgatcgcgaacgacgcggccgtcgtaagagcctgctgaacacgtgcctgaccaaactgcgcggcgtgatgacgccctttgtgtccaatagctgggccaacaagctccagtacaaccagatctacggcggcatcgtgagctcgcagggcttgaagaccaaggacctcaactcggacttcggcaacaccatgtacaacgaccaccacttccactacggctactgggtccacgcggcggccatcatcaaccacctggagcgagatcggtggccaacctgctcgtgcgcgacgtggccaactacgacccggaggacaagttcttcacgcgcttccgcttttcgactggttccgtggccactcgtactcgcacggcgtgaccacgttcgccgagggcaaggaccaggagagcacgtcggaggacgtcaacttcgccttcggcatgtacattttcggcaaggcgaccaacaacgcggcgctcgagaccgtcggcaagctcatgacgcgagtcaacgctcacgccatcaaggcgtacttcctcatcgaggacgccaaccagatccacccgaccaacttccgcctcaacaaggtcacgggcatcttcttcgacaacaaggtggactacgccacgtggttcagcgcctagaagcactgcatccacggcgtccagatgatccccgtgtcggccgtcgcgcactaagcagttcgtcaaggaggagtgggagcaggtgcagaacaaggagacgatcgtcacgcgcgaggacacgtggctctcgctgctgtacgccagctgtgccatggtggacaagcagcgcgcgctgggtgtgctgcagaaggccaagatggacgacggcctctcgcgctcctgggcgctctacatggccgccagcttcgccgagtgagtgagcgagcccattgccggtcaaagaacccgccgcttgttgtgaagaccatcggaaggcttccgacaagcttagaccatcttgccaggagtgacacgtaatagagctcaacacgaggaatcataaaactaaatctgcttcagattgactagatttgctgtgccaaaagtgatacctttccatccaattcatgcaagtactccgggtcaccttgaatccatccaaccgcaccaaatatcatgcaaaacttgaaccgatacttccggtcggccactgcattgggcttaattaaacccaagcatacttttcgttgcagaaccagtgaggaagagctgtcgtcttgctatcgtccacatttccgcggcgaaacaccatggcattcgacagcgagagcttgcgttccgccacttcaatctcaacgagactgcggacgtcgtcgcgcagcaaaccagaaggcgggtcccagatcacgaccttcttgagcttgaacttgcgcgcttcttgcatcgccgcgtccagcagaacgcgtatgatctcagcagcattgtcaccggaatcggggaaccgcgcccgatccacgtacagcgtcgactccttcaggttgtgccaccagagcacgaaggcgtcgtcgttaatcctgacaccgcaacgtgatggcagctcgtcgaagcccgcagcccgcgcatagtgcacgccgttaacgaactgccattcaattgagtcgcgggtcggcaggatcaagaacgcgttacgcccttgaaacttctcgctattagccagcgcgtccaccaggcgggcgttatcagcttccaggaacttgtccggcttatcatccagtaccaatgtcttgagctcagtgctgcttttgttgttgtcgacagccttggtgttgcgagggtggtcaatctccagtgtagccaacttggacgggtggcacttccagccgagcttgtcgtagaatgtcggtccgacgtccgagtagagcacagagatgagagcttggggcagctgctccagctgcttggccacttcggttaggaagaaacccgcaaggccgcgcttctggaactccgggagcgtgtagaccgagctgatttggtacgagaagcctcgctcgatctccccgagcttcgacggtagacgcaggggaaccgaagggtcttgcaatgacagcagagcaggtctcgaccggctactacccccgaatcacttgaggtttggggattctcctcagttttatccacgagggcccagaagagagctccatcctgggagaagcgagtggcgcgctgcgcttcaccttcttctgccattgctgcacgtcgagcagcggagacccccagtgctcgtggtcgtcggtcttgcactgcaccttgagcgcctcctgcgtcaactgcaccacgcggaactgggacatcatcgaaatggggtgatcccagtaaagtacaatccacaagctggtggagaggagagcagcaagcaatggacggtgcggcggcgtttgtaggcgacgggaactacgtgggcgatggcgggggagctactgcagcgtttgtggtacggagcgggagtgtgtatgttgatagagatgacattgtttaattggcttgcttgttgtctgtggatggagtagggacttcgcgccgtggaaggtgatccggagctgtcctggtcgatacattatcaagcacaagaagcaagcgccgttcttggtgaacggagactgccattgactccgtccggaaagtattggcaagttctgatggcgaggtgcctcctactttcgttgtgagtccgcgatgcgttgaccgagtcaaagttgtggtgttcggggggggggaggaagtggcggcggcgttatcacctactgcaagcaagaatcggaggaaggacaagatggagcggctgtctacgtccacacgctcaacacggcgtcggggctgcgcagaaagcttggaggcttgcagatcgaccacgtcctgacaactgaggctcgaaatggtagacatactgtagataagcatacttttgagtattaccaacagttatcgttggttgcggaactcggcgagcgtttgctgaaatgtttgcatggactgctgggcttggagcaccgcctgttggtctctgtagttagctagctgcgcgattttgcgagagcgatcgttagtccactttttataaagcagactctgggcatgacgaggtggtcgatggtactcagcaggttgctggcctatagatgaatgtgcaatgatccaagaaccatcggtcgacgcattcccgtctgcttcgagttgtacgcaggggtttgttctgctcgagcgatcagctcgttcactaacgcagtcgagtcaaagatcgtcggctcttggttggagtccattctattatctttggcacgattttcgtcgctgaaggatgatgccgttgttgggtcaaggagctcctgcagcttcgaccctggactcgttcaccgctgcagccatctccgaggatttcgcagcgaatagctgctgcagttgtcgtaattctacctcttcttcagcgttttcctagcactgcatacctccatctccctcagagctgccctgagtttcgcacaaggaaaaccagttagatgccagtacacagtttagcgttcaacgcggtaccatacttcgtggaagcgatattgatcttggatatcccgcgccatttgctgcttgatagcctccaaagcagcgacgttcgagggtctcgatgaagttttaggggtgtccagttcgcgcagaggctctgttggtcggtctgaatcctccagagtggtgttcttgctttagatagctttgaaaaaagcttcgtggtttgcgggagatcttcccttactcgtgtccttgaggctcgattgcggaatcatgggtactggaagtttgtgttccatctggttgcttaagctctcgtcgaactcacccagcttgtacttttctgctcgcattcgcgcttccgccgcaacgcggtgcattttgtcgtattcagcttggagtttcactagtgctacatctttcgcgtgaagctggttactgcagcgataaacaagtccagggtcgaagctgcaggagctccttgacccaacaacggcatcatccttcagcgacgaaaatcgtgccaaagataatagaatggactccaaccaagagccgacgatctttgactcgactgcgttagtgaacgagctgatcgctcgagcagaacaaacccctgcgtacaactcgaagcagacgggaatgcgtcgaccgatggttcttggatcattgcacattcatctataggccagcaacctgctgagtaccatcgaccacctcgtcatgcccagagtctgctttataaaaagtggactaacgatcgctctcgcaaaatcgcgcagctagctaactacagagaccaacaggcggtgctccaagctcagcagtccatgcaaacatttcagcaaacgctcgccgagttccgcaaccaacgataactgttggtaatactcaaaagtatgcttatctacagtatgtctaccatttcgagcctcagttgtcaggacgtggtcgatctgcaagcctccaagctttctgcgcagccccgacgccgtgttgagcgtgtggacgtagacagccgctccatcttgtccttcctccgattcttgcttgcagtaggtgataacgccgccgccacttcctccccccccccgaacaccacaactttgactcggtcaacgcatcgcggactcacaacgaaagtaggaggcacctcgccatcagaacttgccaatactttccggacggagtcaatggcagtctccgttcaccaagaacggcgcttgcttcttgtgcttgataatgtatcgaccaggacagctccggatcaccttccacggcgcgaagtccctactccatccacagacaacaagcaagccaattaaacaatgtcatctctatcaacatacacactcccgctccgtaccacaaacgctgcagtagctcccccgccatcgcccacgtagttcccgtcgcctacaaacgccgccgcaccgtccattgcttgctgctctcctctccaccagcttgtggattgtactttactgggatcaccccatttcgatgatgtcccagttccgcgtggtgcagttgacgctcaaggtgcagtcaaatgctaatgagtgcctagcttcctgagctatataaatggccgcagaggtgcactgcatcatgcagcgggctagagcaagcgtaaagcagcctttcgtgccaaatttcagccccgtgaatacttcagaggcagacacatcttggatgtacccatcaggcgtttcatgtaaacggcagtcggatcggaagctctcgtttgtcacctgcactgatcttgcgaatcgacggtacaattcgcgcgtgttgggctccagttgacggctctcgcgcagaatacggcggtacaggctgcgcgagttgcgccgagcttgtgcgagcggaagtgagcggctacaagggcaaaggcaacttttgctgcaataggcacgagcagcatctcgtcacacgtcgcagacgcttgtgattggctaaatttcacgcacttcaacttggcttcgccacacgtcgcagatacgtttcattggttgaagccctgtcgtcactttggcgacagattcaaactcgaagttgcgggacgagttagcgatgggcgtaacggggctgctgccggtgctcaagagcgtcacggaccaggtgcacgtgtccaagttcgcgggcaagaccgtggggtggatgcctctgggtggctttacaagggcgcgtacagttgccccgtggacctcgtgctggggcgaccgaccgacgcgtgcgcaacgaattaatctccgttttcgtgacccaaccctcgaattagcgctaaaaactgcaactgcacctgtaaaaggtacctgaacttcagcatccagcagatcaaactgctgcaagagcacgacatcacacccattttagtgttcgacggagctccactgcccacccacgtatgggatacaggatagtattagccaatcacaattgtgtcttcagattgacagggcttgacttgttgagggatacaccaatttcaagccagtaatttttgcactctcggccgctcagcgcgcgatcatttctgcaacggcgcgggcgccaccaagtcaccctcgcctgtctggaggtcaaggcaggtgcaaaacgacgcgggccctaccattttacactgctacaatgaagaaggctatggtcaagcacctgagactacactgcaatgtttgtttcgctgaagatacgttctttccgggtctacctacagaaaagtatcaagggggaagagtggtggtgggggtgcttctgtcggcggcaggaacaaacgcaaagcttgctctactgaacttcgatctcaagttggggtggtggcggcgaacaagctaataagttgggctgtgtcggcagccgcattggtgagattcggccttgagagacttgaggtagagtgctcagtttagtaattttgataaatacatctgggcgtctggtgccgattcgttttttgagcaaaatcgggcgtctggtattttagctccggtagggtgtatccctctacaaaacaaattcggtagggtgcagctctctacatgcgaattgcggtagtacaaatttaccaaaagtcatggaggacagagctctctgctactttgcagcgctcagcagcagttctatttatggcacgtggatttatctgcgaatttgtcgccccacgctttcagcttgacgatctgtatggcatttaagacctccttgtgcttgatgaactcttcgtatcgaatctctcgggtggacttggactgcagcacctgtatctgggggatttggcaatgatagagcccgctactatagcgtcaagaccacgccccccccccccgtactgtatttttctatcgttacattctgatcgattaatgcaaaatttcgactcaggtcgctcgaatgctatttgaggtgttccacacaacctgccgccacatgtaacattcacctaaaatatcatcttaggcggggtatgcgtcttactgtagtgcagtttaaccgataatttgtatcaaaacctgcctatactgctagatgtcaatgaatcaagctggtcaggtatgagccagggattccaatcgccccttaactctgaaataaatttcagagaacagccagttagaagtgtaaagtaaacaagactgctggctggaacatcgtttcggcctaaaaaattcttgaatgcacattacctgccagatgctgcggctgcgaagcaggcgcagtagatggcaggtattagttagcatcaactaacagtgcgtcttgactcgaattttgtgctaagcttttgtgctgcaaaaacgctatccacgggcatctcctgcgcctgcttcgcagccgcagcatctgcctgccttcgactgctagaatcgttcatgacagacttctcgaaagctgcagttgtggctgaactcccaacccttccacaggcagtccgccaactattgcaccagccaccgaagaatatacaacaaaactacatattggtacacgcgtccacatcacgtagagtgtttacattgtgccacaccggcatcactgagggctgcatttgaactttttttctaaactatctgcctgacaataagcctgcagaccttgcacgtctaggattaaaagaatacgaagcagaaaaaaggtctcccagccaaagcgcagcaaccttgtaagttcgcagtattctaaatcatgctgcgttttgtttactttcgcacggactgaaataatctgtaggccgcgtggtcatgaatataactatcatcggcgccattataacccggtatcacactatatgcatgggtacatgtagtcaagctacaaatacttgggagagtgttgctggaggggtgctgcagctggggtgctgccgctgttgaattgtttttgaaagtgaggctctttcttttgaggcgttttataggagagaagacggccaaacaagtgcactgatagcaaccttaatgctccgttcttggggacgagaagttcttactaagattcgaggaagagtgcatctaatgcttcaagatcgtcctctgcaacggacacaccttggtgggacgggcacacctgaaaattgacttatgcctaatatgtctaaaaccggctgattttgaggagctcgttggaactatctttgtgaaatggccccccgcgcaaatctccggaaatggctctccttagtctcgcccatattctcatgaacgtttgattgtgctgctgtgagacaaagaagacatgaacgtgtactgctccgaggcggaagtggacaagctcaacgcgctggaagaagaggtaggcttcaggaaatccagactcgacagtctcgattattgatactgttgctgtgcttatccaggtcgcgatccttgaaggcgaggtcggtgtttttcttaagaccgctgcattcttcaccatctcgcgtggaagtggacactaacccactaaggcaaacggccactttaaggccatcggagcagtttaagaccgtcttcattatgaccaatagaagcgagtaaatgcgattacagtagagctcaaacactggataaatatagaatacatatgtttttggtgcaaaccttcgacttcttctctgcgtttgctgcagtgtacttcaacaatgccgcaagaagcaagcaccaaggcgtccaagaaaacaaccgagagacagagctacaccccagctgaatccgcttacagcatggttgagggtcaaagagatcgtccagcacgacattcttgtgcttcagccaccgcggaaaacaaagggacgaaagaggaaaacaactactacacaaggcagaattctgacacgagatcagcttgggaacgacccggcgccttctcaacccaagaaacgaaagcaacgcaagcagcgggcgaagaaaacacagacccagaacaagacggtatcgatccggggccagtgctgtatgagatggtgctgtaggtactgcatctttaaatcccctctttagtttaatcctaataatacatatccacttccagagttcttagcgtacctaagtgaaattaaacggtactgttttggctgacaggcgtcgatacattctgaaagcaagtctaatcgtggccttaaactgaaaataggagaaatcggggcgctgttatgtttggctgttccatctgccactgaagactccaaaatatagctgaaatcggcagctttacggagccgccgccaccaagctgataccagctacagttgctgagaaatcgcgacttaaaaatcggaatcaatatgcggtcttaaacgcgaggtgctccccctccgggggaggtagaggggggtctagggttttgtgccccaagggtaaagggggttttagggatagggtgtagttttaatcccaaggcgagttaatgttcaagctagaacgctccctgtggacatcccctagcattttcgatacaccacgcggtgtatcgaaaatgctaggggatgtcccaccaccgatttgcaccggatcggacctaatgtgaccgtttgccaccgaatgtgtcccgcttcagtgtcccggttcccttcaacaccgtgacgctgctgtagcacgctttgggcggctcaaagcttcttgacaaccttcgtagggcaccacggagcatggtatgtagtttagaaaccctactttagtgtgggagtcacccttacatagtgcatcttcaatccagtgaataactgcgttaagggctctgttgcgggggactacggcttcaatttagtgtcaggaggatgccttcgtgctctttcctctattactacgatgtactactgaagaatgcattgcgtagcgggcctagaggacgtgcaactagcgctatcacgcagcagtcgctttgcgttcacatatatgtctccttgtttgcatctagagcatctgatagcgcggacttcattcctacaacatgtgaatactactaggcaaagggcctggacgtatacgccgctcgcacccatcgttcaggtcgtcggagataccaatgaacctgaacatccaagcctactttgcgttcacgatacctcgcaagtaatacatttgtgcagatactcctaactacgtcaaattacagtctgatagtgtcctgatatgcttccgccggcggcggagattgtcggagttcgggtgcaaatgtcggaaatgtcggggcctggcggccccaacatcaccgataagtcgcacgcggtgtatcgaaaatgctaggggatgtccaaccaccgatttgtgtacggtgagctgggcatggcaaaggagggggtaggcagcaaggcgtacctcaagctcatgcgctacgtcgactactttgagcagtacaaggccattgcgataagattcggttccacgtttaaactaactggtggtagtaatgagacagcccagagtaagtaggcttcgactacttactctcaaccgacgatcagcttcatgacagataaaatgtagaggaaccgacaattccaacaatgtgctcattttatttttcttgttggtacaatatcgatacccttaataaactcgtctccggagctgcctagcttgcagggtaccatccacccacacgtggcacattcatactcgaacgcatgaacccttcttgttgttatataggtcgaggggatggaggcggcgggtggagctcgtccaggatcgaatccagcccgttggccttgtctccagatccgtcgcgaacgagttgtacggcaccagtgcggactcgtccgtccgctccacgacatacaacacctggcgggacttctgcttcagctcgatcagggaaatgccagcgtgctccacgaatgattcaaaagtgtacgacttttcacagcaggtgcacgtgacttggcgcgacaaggtcaccgtccaattgaaggccagccatccagacttgcgcgggaacgagtggtcgggcaccgaagtgttcgacctcaccacgcggtctacaagactgccgttcgacatgttcatcacgtacttgggcgacagacacaccaccagcgccaaaaagtccaaacttggcgggtccgacaatcgcgccgcagtcgaagtcttgtcactccggggcttggggcgcttaaatagcgcgagcgcgcagagtctggacactgtggctggcagcgcttccgcggcggcctccgggttcgtcatattcatcgtggggattgcgaccgctgcggctgcctctcgcctcaacgcgtgccctctgcgcgaattggtgggcgggttattcgcgctctgacgaccagcccaactcctaagagcaggcaggaaatcgtcgagtggtgtgtggagcgtggtatcccggtgttcgacgaataggtacggcatcgggtcttccgtcgcacacttcgcgtccttgaccaagctgctgtctgtgtggtgcacgaactcggggtatccgaacagcttatcgcagcacgcgcactgaatgacggctctcttcttgagcggccacttgcacgtccccaacttcatcatacccgacactcgaagactcgttgtccgagagcacacgatcgggaagcaccagcgctcagtcttcgtttcgtgatgtacgcgcactgcgccaacaagctcgtcccctttcagatcaggctgctcgggctctccaacaggctcgtacttcaccttcacggactgttcttcctgctttcgcggggaccagctcctggtttgcctgaagctctgcttgttccttcttggcagcagcagcatattgtgctagttgctgcagctctggctgggtcttggtctcttgatgctgcgtggcagcttctgctgggtgcgactcctgttgtcgctccgctaccgtgctgacatgttgctccatttccggtccatgtgtagtcttctcagcacttcctggctcacctgaaccaggttgggtgtcagccccggcgtccacgtccatcggcaccgccttggcttcacttcccgcttttactgcatctttcttgccattaaccccgtccacaggtccagcattcgtatcctctcccttcttcacatcacgaccttcggcattattgtctccttccttcttcacatcaagaccttcaggtggcacgctccgcgatgttgaaggcttggttgtccgcgcgttaagcactccatcatcgagcgctgcgctgcctcttcgtgtacgttgactgcgtgacgtcgagtttgagcggctcggtgtcgaggtcggtggctttgcagcgccgctcttcttggtcttgtccttctggtccttcttgcgctgcttctctagttccatatcgttcatcatctgcaccagtttccgctgccggtactaaatcgccttctccggctgcgcgcacgtcggacagtcacactcccagagatacccgccgctctcacagaaatccacaaacgcagctctgcacgacgcacaccggaagatgttgccacgacgctcgggtgcctcaagctgcagacgcttcagctggtccagaatcgacaccttcgcatccacgtacggcttgaacgcgtgccagaagcacttggcgtggtacacccgtcgacacgcgtggcagtgcatcagcacgcacacattcgccgccttcctgcagaactcgcagtgacgggcgtcgtctcctgccgcctcctccacggactgcttggccttggtctttgtggttgcagccgcgtgcttgttcttgctcttgctcttgttcttcagcttcagctcggcactgggggtcgtgaacggcagcggcggcaggtccgtgatgatcggcgcagcttcgaacacgggcgcttggcgtcgtttcttgccccgctgcggctgctgctcagcgctggtgagctccagcgtgtcttgcgccactttcgtgctgcccgctgtcgttgccgccactcgaggcctcttcgcgggaggtgtagccatctcacccgaacgcttcttgtcactgtaggcttggactccaccacctcctgctcctgctccatgggccgcacctgggctgaagccaagagcatgcccagcgaaccttcttcctctttaccttgtcgagccattccggcgttcgcagcagcggctgcagctctggacggcctccttctgccttcctcggctggaggctgctcttccttcatgatggctacatcgtcagcatcatcaggtaacatagctacatcttgagtcttggctgcatggtccgctggggcacgttgttgtgggggtttgctggctgctgcatcgctcgcggccttggcaaacacgacgctcaatggtgtttcctcgcctttgacctgcttcaccatctcggcattcgccgctgcagctgcagctctcgggcggctggtgcggctactgacaccgtctgcgctgctcttcatggctacactcttggcgtcaaacggggtctgcttctgctgcgtctcctgcgtctcctgcgtctctaagtcatctccgcgcttgcaacttggtcggcacctgctccggtgtcttacaaagacgaagagatcgtcggatctactgtctgtggcgtctctgggtgcgcaggagtctccgccacagaggcgctcgtggtggccatgaggtgttgggcccacttgctggagtgtgggaaggaacgccaggtgattggcttaaaacccggaccttatgaaaatcatggcatgatgggaggcaggtcactagatgatgacgcacatggctacatgttgacagtgtagccatttacagaagtacatgtattattaagcttattatagaagttgagcaggtttgcgatgcacctgaaagctccgtcgacgaggaaaaggccgcgcgcgtggcagtcgcgggcgaatcgcgagtgtgaaggtcgctccaagagccaagacgcctatgacgagctcagcagccactgttgcccgcgtatcggagaccaacgagtcggtagacgatcccaatgaagccactacaagctccagctctgctgctggtcagagccagctccaacccggcagactgcgaggcttcagtcgagccgcgcagtcggtcatctccatgcgcaagctgcagaagtccacggagaacgtggcggaggaggagcagtagcagcagccgaccgattcgtgctcgtcggtcatgtccagcgtggtgcgcagggtgagtcgacacaacaacgcagccgacacggggcttggacacgcgtcgtcaagcgtcaccggagcgggagctgccgcgtccgacaagcgcatctcgctggcgcagatgctcaagagccgggagatgaagaacctgatgcagcaggcgctggtcgccaacaagcagttcggacgcgcagccacgatccccgaggagcagtcgcgtgtcatggcgcactggatcaagctgttgacgttaaaggcgggaagtcggacattgtgaagtactgtatggcacgatcaccgttgcccactcttctccttttcgtttggaattgacgggacacgtcgtgaaaccaatcacgtactcggctgcgcttgcgagaaacctcttgctgcacaataggttgttcgtcgcgtaccagcaagtggatttgatcggtggaggggtcgggcatacctttcagcacgtcttggcctggagctcgtgatctttgtgtgtcagctctttaataagagccgatattttttccgtcttcagcttctttacggcttcagtgtcggactgaagccatgcgtcattgttctttgccaggaaaagctgcaagctgcgcgcaggaacctcgatgtcttcaattttcgcattgatcgcatttttttcaggtgatttatcgtcacattcttgtcgatgacgatagagagcgtgctgccttccccaatgatcgcgttcctcaacgcgacggactctgaaataatcgacataggggcaggaagaacgcgctattggcctcaaactttcaataaatcaacatcaacagacttgaatcatgggtaccctgtcaatccgcaattgatgagacggttcacatggctaacttttgcgctagtcgcacaaacttcagttttatgtatccattatgtggtccctatacagggatgagcgcctataagagcgcgtcgtaaacacatatttttacaaagttataatattaaactcgaaagtacaacatgttgcacacataaaggcctttatgtttgtatacccgcctaagatgatttgagacccgctctcttatagacgctcatccctgtactcgataagatccgaactggccgcctcctcgcacatcctgacacactatgtgtgtatgtgcagaatgagctttgttgtagatcattggcgacactagaaccgctttgatcgggaattttactgggcaaagagaacgattgaagcgggctgaataatagcactaaaggtaagcatttgtatcttctacaagctgcaaacagatctcaaccaaggttcacatttttagttttgtaaagcattgtcggttgatatcctgcatctacagttttagggcaaatttccgggtagatgctgcggctgcgaagcaggcgcaggagatggccgtagctaataagaaaataattaataaaataaaaactagggctatgcataggctgggatagcaattttacggggcaacccggatttttgaaacaaaaaatagtacttctgaacttcagaagtactatttcagaatctgaagtatgaaacactgcagtcgaaaattgttttcgtctgacaactaccagctacattggagtacgcatataacgacaatcgaagagaaatccggctgcaacctcgatcgctagaagtttaactattcaccgcctcttttgcctggcaagtggtaagatgcgctatgagtccagacggcttcgtgagcgatacctttacgaaaatcctggtacattatattagttcttagtaaatgttgcgctttcgtatgtcttgtcatttaaaggttctaaacttatggggtcgctgcggccccataagtctagaaccccttgcgacccggtcgcaaggtagcgtggccacatcttctagtcgatgagctatagacaccactcccaacttgaaaacttgtcgttcgtagcggtcgtacctacctatccacccgcatgccctggctgggggcgacaacaattgccgcagtaccaccatcaaggaccccaaactaacatgactgtccaggttgactacgacgctaaactagagtagcttcagctgacgggtgttgtctcttagtcgtcgtaggctgtgagtgcgcgctggtctcgctgatgggcatcacttagtgttgtcgcttcttttcgtcagctgtacgaaggcagcggttcgatatgcgaactttttcaggtgcgaaactcatctcttgggggagcggagtgtagatcgccacgactttgatctgcgccgaattcgaaatgctgaaggtgcaacacgattgatgtttagatctactagacagaaagtgatatcgcctcagttaccagcttcagctaccgggtcaccaatagaaagacagacagcgacaaaggaccacggataccggcctcagttaccggcttcagttaccgaggcgcgaataacccgatttgggttgcctagcagcatgatctatcggccactgctatcccagtacgagagctttgagtaggctgggatagctaaggaacgttgggtgaggcaaactcggggctgcggtacagtgcatttgtgtcttattcggcgaggcggtgcatgtaaaaaataaagaagtcaagtagttggcgtgtcctcgacacttgatttcgagttactacgtccataggaccagttaaatgatcaaacatgttggcgtatagcagtcgaaaaaacgacacattacggagttttgtttggacggacaatccctcgtactcgttgtatggctgcatcagctccacaccatcgatcaacaccacagacacggtaaaaaggttgtacgtgcaagtacgttttctaatggataaacgtgggagcaaggactcgtattcgggtctccttgttatgtatcgccagtatcagttgagattttacgctcgagccatgatagcggttttgcagcgcaaatgttgatctaacacagaattcgagtcaagaaatacagttagttgattataactacgggcatctactgcggctgcgaagcaggcgattctaactacgggcatctactgcgccagcttcgcagccgcagcatctgcccgataacgcgtctatatgatacccaccgggggcagcctaaacagcatcactaaaactagcaatcacatacggagccaaagcaccatgcctgagggtacctcagtctctcgcggccacgcgcgctacactcgccaactatcattgcacatttaaataggtacgacaactcaatcgcgcgaaagatatatccgcgagtgcacttgcgcaatattacgtacatacttgcgagtgctacttagccgacacgcagaaaactctgtccaagcactcaccatttgctgccgtgtaggctgtctcaggccttaccccctcgtcctccaaagcacccacggaccacgtcaagagaaccgctgaagcgctgcaacatcgttagcttgcacccgcggccgtagtgtccaaagctggagccgagattcgggattggtggagaacgcgtcatcccatagcatcaacgcaaatattcagtttatttcagttcgccggcttcagttaccggcttcagtttaccggagccagttaccggggtgacgccgaattaacctgtgttgggctggccacacacagcactccctcaggggttactgctatcccagaataaagggtttataccttcgcggagccctagtaaattctggtcactaagcagtgcttttagtgaccaaaatttttagcatcaatcagtcgaaaaattaatgccagcggactttttttatcagatttattgtcaactagggctccgcgaaggctgggataggagattttttgtataaattccttcccttatttttattatagtttcttattagctacggtcatctcctgcgcctgcttcgcagccgcagcatctgcccggaaatttgccagttaaaactgtctaccggcaatgctttacaaagttgaaaagtgcgaaccttggttgatatctgtttagagcttgtagaaatattcaattgcttacctttagtctttacttcatttcgttcatacgtacccatacatatactgattcataccagtgttgtcggtagtgcaccggttcaatctgcccacgcatataaaccgtttgctatgatgcctttatttcgcgctcgatcagaagtttttcttacgcctgcattaagacaactaccactacaggaccgcatattttcgagagctcataacaaaactaaactactacccgtcttaagtggttggctacgacgccgaattggaacagtagctagctacggctcaccgacggtgacgctgcctcggtctctctacggtttttcaaggcagcagatctgcgccagcaacgctgtgaactcgatgaccaagatcttgcaagatgaaggaactgccagcacgggcaccagccactgacgccaggcgttccgtccgcgcgtgggacgcgctaggaaacccccgattgtgcagatgtgccaattcggggactggtggtccggggattcgcagtctcaggggtgaaaatataccgataggagatccgatagcacggacacacccgccaagtcattctacacaaacagcactatgactaaacgaaggctgagataggaggattttggattacgtgtacttcgaagaattattttagtgttttgagttaggacgtacttattttacgatctatccgcatctcctgcggctgcttcgtagccgcagcatttgccccgtgtgcacttcaaagcatacagaacattaaaaatgaaaattactccagactcgttggcacggcattgaaatgggtatgctgctcgaaagtcgtgagaatgtcgatgacacacgcgcctggcctaacgacagttcgaatctttcgagctgcgaatactagcgcacctgcaacatccttgatcggactggcaaatcacgagcaaacaggtaagaacgtacgaggcatatcgctattacatggcggaatagagaattccacgcatagctattctacagtggctgcatttacaccatgggcgcatatttcttcatcttggataaggtcgcacaattctagtaaacgcaatgagaccgagcatatagaaaacctcaaatttcagagcttcttcgggccgcaggcacgactttgttccatcctgggggttggaccggactcagcaagacaacaattagctcctattcgctaagcccaaatgctttacctacatgtacactcctcgaaatcgctcactaccgatataatagatacgaagaccgagtttcacagagtgcatacaacatgtgcagtagtattggtactattggggacccgggtggtgataaagatgcttgacaacatcgtcggatagaagtgtttggctattagccaagtattgccgcttgcaaatactttgccctctaaaatagacctctaaaatagaccacgcctgtctcttaatatgagtggacacgagataggcgagggctgatttagcttttatgctttgctgggggccgcttttaggcccagaaactcggtttggcccgtctagaatggcatttctgcgtttccaagtcgtagaaaagcgccttggtcgagaaaacagagccccaagctcggatcttagaccgtactggcgagatatataaatcagacctaggtcttaattaagagctggctggattaaaatcgagattattaacgagataataagcatgcgttggccaaaatatctgcaaacggcaatacttctagtacaataaacagcagatgtgccgcattcccgttactattgtcacaattgtactattcacaggcatttcctctgcctgccggatgagatgccgtgtaaatactagatactggaagactactttagtttaccgtctgcaattaaccggtattgtagatgaggatgcatgtcgatcaggctacctaggtgtcatcgtgccgagcagccaaacgacagatttatagcgctacttgctggatagcgaattttacactttgaacgccgcatctgcattcaaactcgcgagtcgaagaatacatacttgtcaggtgctttgcgtttgtatatggcaagctcacgattagaataaacaaaaccacttcatttggtggagcggcatggacggataaccgctgcaaaaccaaatcaaacctcgagacgcattcagcgtttttgaaatcgtataggtgcagctcctgccgaaaccgagccttagtggcatcaaattaaaatatgcggttcgagatgacaacaccttaattaaaacatccaagcccagggatcggtaaatttcaatatccgtaacaacaactcgcagtaacgtacgggaataacttactgataccccgtcaccaatttcgtgcaataagaaataggaagtctggcgcagaaatctatacaatttgtgcttggtatgatcacttccccatgaagtcgacggcaattggtgtgcaagaggaggttaaaacactaataagtatataatagtaagaaccgttgctacttacttttgctgtgaaaatcttacagaaatcgagctcaattgtaatagaatgcttatactaaaagcaaaatttcgaaccttgtgaggtttgtatctgaattacaggtgcatgagatctaaggcatgctttggtaagcgtagggtacgatgtacgatgatgggaaaccgaagtaaactatccacatgaattagacacttttgttcttctcgcctttatggttaactctttttaactctacacttgagttgtggctacattagtgaggggaaataagaaaataacccaattgtactgggataggaaacaacgttagtgctgctatcgcagaccaaatcggattatatccgtggtacgtcaagtcaaacgacctcttgacatctaactggtacattttctagcaaccggttcgactccggtgccgcactgggccctccaaaaggtttatatgcgtgggcacttcgaaccggtgtgctaccgacgacactggtatgaatccgtacatatattgacgaattgaagtaacgagaacgattgaagtggactgacaatagcactagaggtaagcatttgcattttctataagctacaaacagatctcaaccaaggttcacattttttattttgtaaatcattgccggttgatatcttgcttctacagatttaaggcaaattttcgggcagatgctgcggctgcgaagcaggcgcaggagatgaccgcagctaataagaaaaataatcaataaaaaggaaaaaaaaaggaaaaggggtttataccaaggtcctcctatcccagcctacgcggagccctagttagttggggaaggttggagagtccaatcaatatcatattgtattttgcttagccctgcccaagccagctgcccaactggaaaagtaagccgcaggtgactatgaggccggaatttgcaaacatatcagctgcacaagagtactagctgcaacaaattggcttgagtagcttgcacaggattcatacggatgtcaaagctcaacatgctgatttgtatggattataagatttaaagtggaatcgtcataatgggtgcatcctgaaatcacaaattggtctcgtagcaaaagtgaaagaaaacgagcagtggagtaaatttgtgacgtaaaatgaggttgtcaaaaggggttgccaaaaggggtgaccatcctatacaaaaccccatatgataccctcaagtagcaacaaaataatggtactttcagtactatttttctccgtagaggcagcaacgttgagtataatcacgcagtaaatgtatcataacctggacaaatgtgcgtcacaaatctaaaatgtgatttcaggatgcacccaatttcggcattaatgggaacatagaagttgttaaaatattaaagtattggacgccgcccaaaaccaccctatcggcctatatgtcaaggcctgcgagagttgatagacctaacataacaccacttcacatctggtgagacctaaatgtggtctcaataaactcggcggtacttcaaggtatgcggcctctgatttggcaactttagtagttttagctttgtttttgtatgagctcatacagaaggtaccacctctgcccttaacaagcaaccttctttaaattctggtatatatcacgaacccttgacatacagtactgagaacgagacgcctgatatatccggatttaaaagggaatcatatgtggcagacaccactttatgtgttttacattgaccctaatacctaatcacatcggtaaaatcgggtattagttgttacccgtctcgttacgtatccatagtagttgattggacgctgtagtcgtcaaccgacatgaccaaaactgagctcaacgctaggcgtgagttgccaactatacggtactacgacgaacaaggtgtcacggactgcgtttctgcattctttcgaccatcaaatgtttgtgtttcgatgaagctccattcttcgggtggcatacgcgggcacctgacagcaatctggccctcgagcgcaaaaggacattctactacaatacgacgtatttgtatcatttactagtggcagaaggctctccttaactagttaatggacatatgacggaagctgtggcagcgatagatagaaaacaacgtttgcatgagaaccatagtttctcactccatcgtagtaagtaaagacggcactgtacctaagcgttgatgatgaagaaccggctgttctcgtgcgcggaaactcgacgtgctgggagatccgatccaacttgctgtcggtccgaatgccgttttgctagctatagtaatgctgcgaatgtgaagacaagacgaccataatcgcgaagttctgtacactgcgtagtaaatatcaacattgcgtgtccccgtcacaaatgcacagcgctggtgtagtgctacataatacagccagaccttacactgtttaacgtgggtagctgcatccatacacaacgagcgttctgcacctagcaccgccaagctgcccatacaggagcgaccgctgttttgtgtgttatacacaacgatgtgccgcaccttaaaaacgctttagattttagaagcctaccggtaaagttcaattgaagttgaagataacatacataactcatactaaactcaagtgactcaaactttccgcagcttcaagttgagctacagtagcgcgtctcgagtcctctttcgaggccccagttagatgtcaagaggggtcctcgtttgactctcgctttgaagccatttactttcgcatatttttttcagcaaggcacggtactatcctggcttaggttaatggctaattgaagctattatggatcgctctatagaaatgaatttttacgagatgctgcggtagggacactcgcacccacctcactcgttaaaagtacacagatcactcgtttaagtggccctttcggccaatgagatcgtactcgtaaatatggtctccgctgagatgtaccacttgcggctaggaagcgaaagtgagtggctttcattatggccctcgagcttcaattgcctgggctgtaccagtacagcccaggcatttaaaaacgatgtagaaacatggtgtttcgtacaccgccgatgatgagcagccagcagaggcagcaagcaagcgggtcttgcgtttagcagaagaggaaagtagctttcacattgagtagcataaacagagctgtagaaagaggtgatcaatgctgagtatttgtggagcagaggacaacatagcagaaaatgtgcgcatggaattgctgcgatcgcgtgatgcaattgctacggagccaagccaaaaagagcaacgcaggtttgaagtatcatgcgagcagaaggctagagacctcgtgcgcgaagagcctcgaagagactcgagcagcgctactgttacgattttgtttgcgccgtctcacaaattttgtggtcctggccagcaccgatcagacccaaacttcccccgccaccatcaagcagcagcttcctccactgtccctaccagcatgcccgtcacgttcgattccccggacagtctgctcgatatcgaactcgagattgtgtcggccaaggtgcgtgtggtcacgagcgtatctctgcacttctgctccccattctaacgactgcattcgttctccagggcatcgacaccggtgactacctcggcctcaaggccgctctcaagggcgagttctcgtcgagggacgcgtacgtttacattgagatcgacggccagaaagtggcctggacgcggccgatcttcgacacgctcaagcctgagtggaacgagaagttcgtcttcaagaatgtccagcactcgttggtgttcaagctttcgctgttcgacaaggatgtggacgccgacgacgagttgggcgaggcgcagttcattgccgacaccgctatgtatgccacggagactgcgttcgacctgccgatcaccatggccggtagaaacgccggcacacttagtatcaaggtgaattcgcaccctgtgagctttgacgaagacgccgagctgcaagaggtcggacctgtgcgctactctgtgcactcgagcttttcggccgggcttctatccatgctaacgtccaacgacgaccgactcgagtccttggcgtaccgcgtccagctacacaacatcccgcaattcttgtcgagagaccacgagtacaacaagaactacccaacgatccagcggatcttctcgcccgaccacccagagtcgcctgtgtttcgtcaagcagtcatgacgcagcacgccgtgatttactcgcacggcgcgaacgaccagggatcggacaatatatattggatattgattgtcggcgaggcagtcatcacaatcacttgtgtcgagcattcgtaagacagtttgacgacaaatcaaatctagtgatttgattggcgaatagtacgacttgccaattctgttggcactgccaggcgcagagtgctcgcaggctctgctaggaaggcccgcgttcctcttcgctactctttttgatgcatttcgttgcacttcgtatcctgactaatatcgggcgcagcgtagtagtggtagtaatgattggcggttcgatagaactgtgcggaggagcgctgcgacaccaacaaactccctctacatatttaagacaccacggcgagcttagatcgtttagatttcctagtactacagtagcaggccgagcaaactggtaagtgccttcagccgggctgatcaattactttagctttggcatttttcatgtattcccgagaagtttcgccgctcatttgactcttagaggccctcacgtcgttttgtagttatttgtttgcgacaccaccaacagcttacctacacgtggccgcgggtgaggtcggtggtgtccactaccgacgtaggtggagctgcagcagtgtgcgcctccgggagtaaggtagccaagcaaaccgcaacaaatacaaatacaaatacaaataccaagactggctgacgctgccttgttgctactacaaaacagttcatttcatgactttggtaagatcccataatgtattgattgtctactccctcgcgtcctccgacaacgcctcggtgcggagcatgtgtgcgcgctcgtcgtgcactgcttcgctcggaggcgtcctcagaggacacgacagggttcgtgggccgcactaccggaggaagaggggctctatttggttatgcattaactagaattcactataaagccctgaacgttttgtttgtcaagctgggctaatggttcgggtgcatttatttcttaaccattctcaaacaagcgtgtacattgtagttggcagtagggccgcactaccgactacatgttcgagcgccttatttcgtcggctcgactgtaggtggcacgagcaattcaaaaacggcaaagcggttgtcctcgggttcctacatgctcaacggaggaacgcacgcaacgacactaccctctgaaagttttggccaatcgcatggtgcaaattgttgtccgacaaactgtcttacgttttgacggacaaaatacaatgtagccactggtatactaaaaccaagatgtagccaaaatgcgttgattgcaaaacgtaagacgctttgtcttacggtaggctctctggggctaagtatcgtcctacgaaagagcatgaatcaatattgtaccaatatcaatatttgcccctatatattgccatacttgcctttagtatgccgatatattgtactatactagagtatatgagtacgttgagtaatgttagcatgatcgtcatgcacttattcccaatggttagcgagtctttacccctaactgtacgtgtccgaacatgattgacggtctgcctagtgtctaaagcgaaagtgaccagacagaagcatcgacgagcaatggtggagactcggttggggggacctctccctctttcatgacgtctgttgccaaggacacaagccaagttattatcaccgacgtaggtaccgcagtaacgctgcagctctgaggtctaaagtgtctcccctcctacgcgtacgaagtcttttcgcacgtagtcgcagtatctgctcaaatttattacgtatacacgttggtgccattacgtggctgtaaagaaaacagaagtgcagccctgcggacctcaaggctactctcatggagaaaaccatagctcgataagagagcaagtctacgtatacttaattcggttgttcagcaccatcgacccctcgacgcgaagcgtgaaaaaaactgagacagctgcgaagaaggagcagcagcgacttcggcgtgaaaagaagaagaaacgtcagaaacgctgaggacacttttatcaagatgaggtgaacgccatctttcggaaaacgtaagcggaacagtacaaactatttttactttacgacgactgccaaatagtacagtgttgttttttctccttattttattcctactcctatttgctggttgggcttgggtgacggggaatccaagagagagatcacaagaaattcgtgtgtcgacgcccggagcgtttgctccccgcgaactacatcaagaagatgctgaaggacgaccagtgtctcgttttaatcctgaagaaacgcggtgaggcaagaggcagccgcagcggtcgcaatccccacgatgactatgacgaacccggaggccgccgcggaagcgctgccagccacagtgtccagactccgcgcgctcgcgctatttaagcgccccaagcccggagtgacaagacttcgactgcggcgcgattgtcggacccgccaagtttggactttttggcgctggtggtgtgtctgtcgcccaagtatgtcgaacggcagtcttgtagaccgcgtggtgaggtcgaacacttcggtgcccgaccactcgttcccgcgcaagtctggatgactggccttcaattggacggtgaccttgtcgcgccaagtcacgtgcacctgctgtgaaaagtcgtacacttttgaatcattcgtggagcacgctggcatttccctgatcgagctgaagcagaagtcccgccaggtgttgtatgtcgtggagcggacggacgagtccgcactggtgccgtacaactcgttcgcgacggatctggagacaaggccaacgggctggattcgatcctggacgagctccacccgccgcctccatcccctcgacctatataacaacaagaagggttcatgcgttcgagtatgaatgtgccacgtgtgggtggatggtaccctgcaagctaggcagctccggagacgagtttattaagggtatcgatattgtaccaacaagaaaaataaaatgagcacattgttggaattgtcggttcctctacattttatctgtcatgaagctgatcgtcggttgagagtaagtagtcgaagcctacttactctgggctgtctcattactaccaccagttagtttaaacgtggaaccgaatcttatcgcaatggccttgtactgctcaaagtagtcgacgtagcgcatgagcttgaggtacgccttgctgcctaccccctcctttgccatgcccagctcaccgtacatatacgggtgtcctttgcccttgagaaaccaatcggcgaactcgttgcgttcgctgtagtattgcttgaccaaggttgcctggcttagtcttagatttcgacaacagcttgttgcccagcttcactgccatggccctgacgtctgctgacagtccgaagcccctcccctcgttctcctcgtcgaagtcaaaagtcggccgacttgtcggtccgtagagagcgtttggtgttgtcttccgaggcaaacgcgcgattccaggttggggtctcgggcactgtacttcggttggggggactgaagcgcttgcagtggcgagaagagcagcggcagccagcagagcgagttggaagacgcgcattatggctggctattgggagtgaagctttgagggcgaagtgcgacccgccgaggaattgcaaactgaagaactgggcgcattgagcaagtggtgtgccgaatactgtactagcttcttgacggtcaatggccgctgacttcatcggtggcaaatcctaggaaatgataactttttatgctggtgaccattccagacgcatctgggtaccagtaacactgcactagcaccactactctattaggggtagtcagagttgctcacagatgccggattcagaagagagcgggtggaaactacagataaacataccgtttctacagaaggtgctccaaaaatacagacgtgccaacttgacgacttttgattggttttgaaccacaatattcccaatagcgccagctaatgcttcacaatacggctatcccaagtttgtctttggcggaggcgcgcattcacttactggttgaattttgcgcccaccagcacacaccgacgagcagcccgacatacattcgtggctgggcagagctgcagggtaatgtataaaagccagcctcaggttcgccagctaaacctcgacatcacttcgagctagtgaacacttcggagacgtgtaagaacacagggcgcatcgcaagagtccgtggcagcatggaagattaatgagatagtggttactttaatgtactcgaatcgctggcagcgacaaaatatctcttgtgtgtgtttttaggatgcgtggcgataagataagaaacatcttcgtcgttttggcctcccgccttcttcgcttagctttgtgccggggttgtcttggtctgcttcgagttgacggccctgtgtcacgcgttatgacaggcagatcgggttgtggacggtatgaagagagagtgccgtcaacagaatacaacccggcaaagcaggccggcaagaattttgaataccaagcttttttgttttcgttttcagtttcagcatgttgttgtcacttaacttgaataccaataccaacctttttaactgccggctgtgagttttatcttttgaaagatgtttaaagccaaagtttaagccgaacacctcagaagttgactattcgcgactgtcagtctcacataccgacacgcacagcagtcaggcatggatacgctgataatcagttttgcgaaaaattactcaagcatcagaaacaatactcagcaaaacttctaatgtttgtgtcgccatcaactttcgagcacgcaggacgatacttcgctacggctgcccttagctagggtgccagtgtatgcattgcgtttattccagcatggcttaagcttcctttgcttcgtcatctagttcctggcctttgcgaaagaaaactctgccagataatctatgggatcggtgggctgcaccttgacgacttccagcattccctccgtgagtgctggcaagacggtgtccatgagatacgtcctcagaggctttgctcgcgtctccagtagttcgacttcctcgcgttgtagcaactcaagccgtgtgcgttcctgagcgagttttgcctgttgagcggcctcgtcctgagcatcctgctcctgagtgcgctgggctgcacggatctcagcttcacgagcttgtttcttggcagcacggcgctgttcacgcagctcagcgcgcgtagggtgaaagttgcgaggtgctcgacctccttgctccatgtaacgctggacgggagcagtgaacgcggcttcgtcacgatatgcatgatcgtctcgcaaagacagctccagcacttccacaccttctgccttcggctcagtcgcgtcgggagtatgctttggcttctcgaacacagctccagagcttcaatgttggcctcgaactcatcaaagcgccgagcgaaaaaatgcgtcttgtgtgttctctgtgcgctcagcttcagcctccgacaacgactgcgcacggatctccagcagcgtccgcggggcctgcagcaccatcactcggttgggcgcgagaacgagtcgtcggggcttcagacgtgccagcaccgcctcgatatctactgctggcgcagtagttcccccctcggcattctcgtctccacctgcagcctcaccgccatcggccgcctcaactgggccactgttgcaattttcaccagcttcgcccgacccttcaccttctccgtcagggttgccatcaccactaggctccggtgcgatgattaattttgcctgggacgcagagatcgggagtccatcaagcacgtatgcctggttacggcacgcagcactgcgcagcttccaacgtagcaaagctaccagtgcggttttagggagctggtgggtgttctcactcgagccactggttaaagtcggagcccattgctgcagctcgtcccgcaacttccgagtctctgaaacctctgggacctcgttctgcttctcaccgtcgttctcctgctgccctccgtcactctcgggatcagcctgaacaactttggtcggaagtgaaggcgcggcgtcgttttcaggcgcaaaaagctcgttcagcagcgtcgtcggggacaaatacggcagataggaatctctcgcaagtcgccggccaagcagggctttaccggcacgaggtgcaccaaggacaaccgtgcgcagtggacgcaagtccatcgcatggatgaaatcgtcaacgaagaaggccagattcccgagaagaccgcgcgaatagtggcgccactcttccggtgccaccaacgaatgcatcgctccagcggacgtgtcgaagcgcaagtgaagctgaagtggtgctacaagttcctcctcctcatccagtagcagtgcatcagcttcaccgtcagcggcactggtagagtcgtcgcgatcacgtacgtgccccgaggcgagcaaggtgctgactcctcggcacacgtcgcgcagggtcgtactactgctggtcttgtccacagcaagtatttcttcggaggtggcgacggcgacgctgccacgcggaaaaccaggagcgccaggtcgtagagactgatcatgggcagcaaatttcgaccttgggtaggggcggcaagactcggcaccaaaagcggccgattcggattcaaccaggcctcgcggaagatcagctgaagctgtgactgggccccaccatcggcacctacgatgcaggtttcaagctcccccgtgcgatgcgcgctcaagatctgcgtctcggtagttttgaggtccgcgtacttgcgcgctggccggcgcgacttgaagtcgtcctcaacgtgagcggcacctgcgcccgaagcagcgaatggcgcgttcttgctccacgacagcaccgaggacacggcgatgaaacgcttcacgctgtccccttcgccttcgttcgcgtcctcgtcacctttcgtcgtcccgcgtttctcgcaagctttgagcgtctccatggcgagtttcgggtcgctcaccaatgcggtgaccacgaccacgtccgcgagctgcacaagtcgacgccacaccgttgggtcgctctgaagtgcgacgagctccttgacggccccctcaacgtcgctgctcgggtggctctgctctgcaattggcgcttgagcgccgccagctccgacttgccaccgcgggcggccgtgcccacgacctcgagtcctgcatcctggcagttgcgtgccaactcggccgagagtgacgaccccaagtccgtgatgaagacgcgcatgttcgagcgtgctttgacccaatgtgaagtttcgccaaatgcaggaaggggttctcgattcgagatgccggcagttgcagtaactccgactatttttgcatcgatgatggtgtatattgggcacggcgagaagcggtaggcgaatttcaaggctcgacaaccccaggacgtactgggatgtgcatacatctaccaatatcccagtgggctttgcacgcttaatcctcagcggcgacaatgaaaaaggaactcgcaccgctctccacgggcccgaaaagcatcgcttcgtcgtcacatcctcggcaacgcaatggtacggatgagtaggctagcatctttgcttgtcaacacttgtgataaaacgctcaccttttatttacacttggatgcaaccagtgggcatactcgaagtcaagatgaagcaccggctgcaggaagaccagaaggctgttgccgtgggtgttttgtgtaagccaggcaagcaacatacctgcgctttgcacaaacttggacactcgggataatggggcgttgagggacgcgctgctactgcttcagcaactcgcacaaactccaggagtggggccgctgctggtgccgtattaccgacaggtcctgccgatactgaacatgttcaagaacaagcgtcgttaccttggagatgatgtagatttccgacagcagcgttcacaggaccttgcgctggagctgctggaacgaacagggggtgaggacgcatttattaacatcaagtacatggtcccaacatacgaaagcgcgctgagctgacaacaataggcaaggtaacaaaatattagcacggtacattagtggaggggcgatggcttcatactcgtcacttcactcgtttgtcttgatcacatgctctcgtcttctactggtacaggtacactctgtggctgcaacttgtcaagttctgcttggtggcgcttgtggatgcgttggatttcgtcctcgcactcgcggacttgaagctcttccacgtgggcacgaagtttctcgctttcctcggcatatttgcgctcgcgtttctgcggtaaatctactaagtaaagtatagctgtgagtgagcgccggccgtttctgatgccacattttagactggactcaagaggtcatagttttttgtgagggaggagcagcatgaggcagggacggtcgaaagcagggacggtcgaggttcttcgttcttcgcaccagcagcgtttcgcgaccccgagcactacaaatcgcccaacagtgaaaatgctctcataattcgtcatcttacatcatgtaagttacatgtgtttatggacatagggttcgtcatcgcacctactgttttcgtcagatgtcttattgctcacgtgatgccacgctattgatcgctgagttcgtgctggtcacgcgacctaccgctcaatacaactgagcgaagcgcgtcctagatgtcgggatgataacccacaagttttcttcactgacaccacagccattgtgttttttttcccagcacgaaccgattcaattgcttaatagtagtgtatgcaaacgggttttcgccacggtcaatgattgcacacgacccactcagcacgaacgaagtaacaagtgttgccggagtctgtagcaaccacggtgggtgcaggtgctggggagccactggggacggcttcatctcgcgtcccagacgcgtatgtcttgcgaacgagccgatcacctcagccatcacctgcgaggctacggcggagaactcctttttcaccggatcgataaagagtttctacaggtaaagcaacatccaagtgtggtgtcaaataacagcagtgtatcggcaactctgggccaggaatcgtcaccttaatacggtcgtcgaaccggatgatagcctggaacaggttcacgttctcggaagcagagctgtcttcgatcagcttgctgtaaataagcgccaggatgtcgcacagcgacagcaacacctctcggtagtccagcgggaaaggctacaagtacacaagagcacgcgccgtattagcgccacagcagccccacataagcgtgaaacgagcaagccaggcgtcatgagacggcgatataccggacgctggtgccagttgtgcatcgtgggtcggaacggcttgtcggccgagtactgcggactgttctcctggtccagcggctcatgctgcgtacttgacgtcgccactatcaattcccttaccattccctgcaccgtcgacgacgagaagtaaaactcgagctcctccagcagctggcagcagtccaaggccagcagctccgggtgcagcgactcccccacgagcctgccgagtccaataccgaggtagaagaactgcgcgccccgccggatgctctgcttgtctccgaggtggttcatcacctgctgctccctcagcagcgccacgttgagccagtagttgggtccttcgtgcatggccttgaggtagttccagtccgagcgccggtgctgcaccaggtcctccaggatgcgcatccgctgctgggccgtcacctggcgcagtatcgccgcctcctgggccgccgccgcagctgccgccacctctgcagcggctcgatcggccgcgttgctggcgcggtcctcggcctcgtccccggcttggctgacactggagctctgcgacgagaagagcagcgagccgaaggacgacgacgcgctggccagtgacgacgtgagccccgaggtgagcgacgcaacggacgccaaggggtcggccatggatgcgtccgcggccgcgccgctgggtgaggaagtgtcgggctccgatgtctcggaggtgacgctgctggggctcttggctaaaggcgacagaactttacgcccgcttttcgccagcttggacgccatggagcgcgccgcggacgaggccttggacggcagattggacgacgaagagctgcggcggttactagtgttgctgctgccgtcgtcgtccccaacgctggcctccgatttgtcgccctcggcttcggcatcgtcacggcgagtagggtagtccggcagcgcagagggcggcggaggcagcggcgccagcacctcctgctcgctcagcgcggacgcgtccgctgctgctacagcgggcgacgccgcgtcagcctggcgttgaatccattttggcgtgtggatcgtcaacttctggatgatctcagtcgcgacataaaagtaggacaacttttcgtcgttttataacgcctctaaatacacgacacatgctaacgcctataacgcccggcaagcttcttcacgtcgaggcggcctgcggccggagcgactatggggcgcattgcgcggctggagctcgagaacttcaagtcgtacggcggcgcgcacgtggtggggcccttccagcgcttcacggcgctggtggggcccaacggcagcggcaagagcaacctcatagacgccatctcgttcgtgctgggcgtgcactcgcgccatttgcgctcgacgcagctcaagcacctgatccacaaggccccaagtgacgacgacacaaccagcgcccgcgccgccgccgtcacgctcgtctacgagctggcggacggcgaggcgcctccctccgcctcgtgcgcggcccagcagcagacgtcacagtcaccgtcgtctcaaaacttttgagtcaaaagaaggtgcggttcacgcgcctcatctcggagaaaggtgtgggctcgtaccgcatcgacgcgcgcgacgtcagcgccgagacgtaccaggcgcagctcaaggagctcggcatcctggtcaaggcgcgcaactttttggtcttccagggggacgtcgagagcatcgccagcaagagcccggacgagctcaccaagttcttcgagcagatctccatgtcggacgagctcaaggccgagtacgagcagctgctggaggagaagaaacattgcagaagctgagaagagcatacagaatgctgacgaggagaatcgaggccaggctcagaaaaagaaaagctctcacagcagctggaccgagtcacaaacaagctgcgcgacctgaaaggcgacaagcggcagtcgcaggcagaagcgcgccaggcagagacactggagacgctgaaaagagtgtaccccggtgttcgtggccgcctcgtagatctgtccaagccgatccaacgcaagtacaacatggccgtgaccgtggcgactggaaagcacatggatgcaattgtggtacagtaacagactacaggacaggccaagactgcattcagtatctccgtgagtctcgtgcaggtagcgcgcagtttattcctctggataagatccgtgtaaagcctatcaatgagcgctttcgtggtctgggctacaatatcaagatggtcgtcgacgtgattgaatgcgacgcggagattgagccggcgttgcactatgcagttggtgatactgttgtatgtgactctattgacatcgcccgggacctgtgcttccatcggaacgagaaggtgaaagctgtgacattggacggaatggtggtgagcaagaacggcagtatgacgccaagaatgacgtgcttcgggctggccgctgggatgaaaaggaggtgggggccttgcagcaacaaaaagatgatctcatcgacacaatccgcgcaatggagcggcatggtgcttcgtacgcaaagttgcaatcgttacggacacaactggaggggttgagaagccgactcagtcatgctaaggcagacttggtgattactgaaacaaaacgaccaaagattcaagcgcgaattgatgaggccaagaagcgaatggccgagatcatcgagcctgagcttcagaaatatggaggggcggtcagctctcgtaagggtagcattgcggcgttgcaggagcaaatcaatggggtagaggacgaaatgtttgcagatttcagcgaggctgttggtgtcgagagcattcgagtctatgaagagaaggtgttgaagcgacaccacaaggcaatagagatgcggcgcaaaattacggagcatgaagccaaactccgtgctcaggtaatgatttggcggtgccttgtagtcgatttattgatgttctaacacagtaccgttgtattgttttggctcagatcgagtacttgcagtcgcaggatttcaatcaacccatgctcgacgcaaaggagagggcaactcgggaagccgaacacctgaagcaatgagctgaagaggaaaccggcttgatgaaacgagtggcagcgttgcagaaggaaaggaaggagcaagaaggactacgcaagaacttgtcagcaaaggtggaggagcttgagaaggagcttcgggaaatcggcagcaagaaagccaaatacgaagaaagaaagggcaaaattcaaagaagaattgcttcggaggagatcgtactggagcgcctgaaggatcacaagacggggatttttaagcgggcgtcgctggatcaggtcacactaccaactattgcttatcaatcctcaaacggcaccgaagatgtcgagatggaagaagccaatgcgaccggtgtgccgtcaaatacgagcagctcagctgatcatgacagcctcgagagctcagatctactcgcaacgaaccaagaagtgggtttctcggcgcttcctgatgcgcatgtggtgatggatgataaggagtttgatgagatcaacaccaagtacgaaaagcgcatcggtgtgctgctcactgagctggagcgtatgaagccaaacatgcgcgcgctggacaaattcgacgtgatccagaaccggattgggaaagaggaggaggaactggatcgtatcaagcagacgtcatttgaaacagcgaccaagttcgaggaggtcaagcaagctcgcttcgatcgattcatggaggcgttcaaccacatttccggagtgatcgactcgacgtacaagcagcttgcgaagaactccaagcaccctctgggagccacggcgtacttgaatctggagaacgccgaggagccctacctgaacggaatgaagtacaatgcgatgcccccgatgaagcgcttccgcgagatggaacaattgtcaggtggcgagaagaccgttgctgctctagctctcctcttcgcgatccacaactaccgtccgtctccattcttcgtgctcgacgaagtggacgccgcactggacaacgcgaacgtgaacaaggtgtcgacgtacattgccaattgcgacttccagtgcgtggtgatctcgctaaaggactcattctacgagaaggctgacgcgctcgtcggcgtctgcaagaacatcacgctgcaacaatccaagtcgatgacgctggatctcaccaagtttgactaactcgacgtcgctatggaaggcagtggtgctgaaaggggtcaaggactgacttattattttcgcatgggctgcataccgcctacggtgctgtagggatgcagcttttcaatcgatgacgaagttataacgcggtgtgctttcttacttggaagtactacttttagtcccttggtaagttttcaatgatgaagacttaggctgttcatagtgaccaatgaatcattggcagtgaaacaaagtcgtgctgcaccctaagaggctctggaatttagggataggccctatcccagtactaacagtaagcaagaacacttgaaaaatcccaaagactgtacagcagaattaaacagttctcaacttcacacccattgttgagctttgcatttgcgattatcacgtaagaaatgcagcacttgtgtcaacgcagtttcaacacgagcacatcatcacgtggttcttgtagccttaccactcccatgtggtttgtatgagtcagtcaccatctcactacccctgtcaacgacgtcaagctaattccacgctcttcgagtttcgggccgcagatcccttcgcctctaccatgaaagaagtctccataaccaccagccgacgaaaagtcgtactattggtttgcagtctggacaacgtccactgagggtttcgcaacaacaactgcctctagcgtcctttctagctcgtcgataccggcaatcccgaaaaactcgccacgattacctcgcgtagataaatccagcagaataacctcatcgatgcccgcgcggtcgtccttcgagtcttcagtcgaatatacggcaaatttggcaccttgaaacgtttcattgtggaaggtgtaggccgttgcacacaaaatgagaacgttcagtcggggaagcgaggacttgggcaactgcaggcacaccttgctaaacttcttgcactcctcacgtatggtttccccaccgaccttgctggacttggcatagtttttaacggcgagtccaactgttaccatggtacctgacgacatcgtcatcagcaggatgtcgggcgaagatgacttcggaagcggcttcaggctcaattgtccgttttcgagcgcaaggccgtggatctccatcagcaacgccttcaaatctcccggatgcgcggtggcttcggttaacgacgactgcttctttcccttcgatgttacttgcggcatttcatatgtgatcttcgcgaacttcacctttgtgcgcccaaaagatgtatctgcgaaaaattcggagagtacgtcgctcggacgtttctcctcgtcaataacctcctggaaccgcgtcatgcaaagcagctcgaactcgtcaggatgatcgattgccacccgaccaagtgctggtgcagctctttcaagaagttctctgaacgggtagaaggaacttagtgccgcgtgctggatatgttgtggtatatgcagcctcgccgtcttcgattctccttcccatgcgattccaaacatatccacaatggcgtcgtatgtgatttctttgccgccctggtctctccacctttgtcctaggtctactgcttcgtcagcgagtagagcagtcatcaaaaatcgaagtggctccttgaaattccgcaagcgttcgccaaaccgttgccagttcattctttccaccaactgaaaaggcgcatcatacgagttaagttcctcaacggattggcaaactttgaaagcgcgaagtagtgatcgtggatgtccgaatgttgtcttgaacagatggtcagcactcttcttcacttcgccatcactgagattaaagtgctgctgaatggtttccgtcttccccttgtcccaatacgtcgtcttaataatttcctcgattgcaggtgaccggagaagattgaggctgagtctttggaaatcgacaaatctgtttgtcatttcaacgcatgcggttggtctcaaaccgacgtagctcaggaacgttgcgcgacagcaatcaagaaaaataacttcttgttgggaaacaacggccaaagggctgtgtgcagaattccacgaagcattctcgtttggcgatgtcaccaagcttgacagcgtcgaaggccgcgccgatttcgtcgatcacgatgaacagtggcccaacttctttcgtcaaacgtttgaagactgacaccagacctgaattggtttgcagcgactggggagtgagagcaccgggtaatctgtcgtatttctcctcgaagaaataactgatctgctccacgaaagcagcgtcggccatatcagaattaaacttcaactcgctatccaggaggtccgttcgggaaaactgaatctggatcgtgtggcactgcgtcaacgtgtccaggaaactgtctttccctcggttggggtgagcagcccacatttgttggcatctccgaatgtactcggcaccaaaccttgttttcccgatgccaaacacagtgtccaccaaggggaccacccaattttcaccaccaagtccgatatttgcgcgattatagttgtttgcgtggaactcttgaagttgtagcgtcgcgtgctcacggttcacgaaagccatgatgccatcttgcacagaatagacaggttcctcttttcgccacacccactccgtaacgccagcggttctgtgtcgcttcgctggactctcatcagcttcatccttcgtttcctcccgccctcttgtccgtagcacggtcacgacgagcgcctcctccatcgtttgaccaagcgaatcaatgagtgacttggccttcaaaggcccatcactaccgttgaacacctgcacgtcgtttatagcgacgccggcgagataggtagtgctgtatttcacctccaatgcatcctttagatgctgaatcgtcttatactcgggcagtggaaccgatgcttcactggtgatgcggccatcggctgtctttatcttgaaccagacctggggaactttcacgatgatggggtcctccttctccactccgtagttctccaaactgtcgttctccgtcagaaaactccccttctcctcttccttgctgtttgcgaacactttgaggtctaacgtgtcaaggtcggctgggaaaaggcctcgtttcgcaagcagatcgcagaaatcaccaacagcagatccagcaggaaccctcagctggtgggagcgactcgtttccccttcgaccacacggaaagcgttccacggcgccgcctgcgcctccatcgttgtcgacttatctagatctagacctgagggtcgatactggcagcggcaggctgccgatagccgccgttctcggcggtgttggccgttctacttcatgtatgcagtgcctacaaactaatgccggtcgcgtgcgcggctcgaatcgtgccggcggagctggcggcggccgcgaacaacacattttgccacattatctagatctagacctgagggtcgatactggcagcggcaggctgccgatagccgccgttctcggcggtgttggccgttctacttcatgtatgcagtgcctacaaactaatgccggtcgcgtgcgcggctcgaatcgtgccggcggagctggcggcggccgcgaacaacacattttgccacattatctagatctagacctgagggtcgatactggcagcggcaggctgccgatagccgccgttctcggcggtgttggccgttctacttcatgtatgcagtgcctacaaactaatgccggtcgcgtgcgcggctcgaatcgtgccggcggagctggcggcggccgcgaacaacacattttgccacattatctagatctagacctgagggtcgatactggcagcggcaggctgccgatagccgccgttctcggcggtgttggccgttctacttcatgtatgcagtgcctacaaactaatgccggtcgcgtgcgcggctcgaatcgtgccggcggagctggcggcggccgcgaacaacacattttgccacattatctagatctagacctgagggtcgatactggcagcggcaggctgccgatagccgccgttctcggcggtgttggccgttctacttcatgtatgcagtgcctacaaactaatgccggtcgcgtgcgcggctcgaatcgtgccggcggagctggcggcggccgcgaacaacacattttgccacattatctagatctagacctgagggtcgatactggcagcggcaggctgccgatagccgccgttctcggcggtgttggccgttctactttatgtatgcagtgcgtacaaactaatgccggtcgcgtgcgcggctcgaatcgtgccggcggagctggcggcggccgcgaacaacacattttgccacattatctagatctagacctgagggtcgatactggcagcggcaggctgccgatagccgccgttctcggcggtgttggccattctacttcatgtatgcagtgcctacaaacaattgccggtcgcgtgcgcggctcgaatcgtgccggcacagctggcggcggccgcgaacaacacattttgccacattatctagatctagacctgagggtcgatactggcagcggcaggctgccgatagccgccgttctcggcggtgttggccgttctacttcatgtatgcagtgcctacaaacaattgccggtcgcgtgcgcggctcgaatcgtgccggcagagctggcggcggccgcgaacaacacattttgccacattatctagatctagacctgagggtcgatactggcagcggcaggctgccgatagccgccgttctcggcggtgttggccgttcaacttcatgtatgcagtgcctacaaactaatgccggtcgcgtgcgcggctcgaatcgtgccggcggagctggcggcggccgcgaacaacacattttgccacattatctagatctagacctgagggtcgatactggcagcggcaggctgccgatagccgccgttctcggcggtgttggccgttctacttcatgtatgcagtgcctacaaactaatgccggtcgcgtgcgcggctcgaatcgtgccggcggagctggcggcggccgcgaacaacacattttgccacattatctagatctagacctgagggtcgatactggcagcggcaggctgccgatagccgccgttctcggcggtgttggccattcaacttcatgtatgcagtgcctacaaactaatgccggtcgcgtgcgcggctcgaatcgtgccggcggagctggcggcggccgcgaacaacacattttgccacattatctagatctagacctgagggtcgatactggcagcggcaggctgccgatagccgccgttctcggcggtgttggccattcaacttcatgtatgcagtgcctacaaactaatgccggtcgcgtgcgcggctcgaatcgtgccggcggagctggcggcggccgcgaacaacacattttgccacattatctagatctagacctgagggtcgatactggcagcggcaggctgccgatagccgccgttctcggcggtgttggccgttcaacttcatgtatgcagtgcctacaaactaatgccggtcgcgtgcgcggctcgaatcgtgccggcggagctggcggcggccgcgaacaacacattttgccacattatctagatctagacctgagggtcgatactagcagcggcaggctgccgatagccgccgttctcggcggtgttggccgttctacttcatgtatgcagtgcctacaaactaatgccggtcgcgtgcgcggctcgaatcgtgccggcggagctggcggcggccgcgaacaacacattttgccacattatctagatctagacctgagggtcgatactggcagcggcaggctgccgatagccgccgttctcggcggtgttggccgttcaacttcatgtatgcagtgcctacaaactaatgccggtcgcgtgcgcggctcgaatcgtgccggcagagctggcggcggccgcgaacaacacattttgccacattatctagatctagacctgagggtcgatactggcagcggcaggctgccgatagccgccgttctcggcggtgttggccgttctactttacgtatgcagtgcctacaaactaatgccggtcgcgtgcgcggctcgaatcgtgccggcggagctggcggcggccgcgaacaacacattttgccacattatctagatctagacctgagggtcgatactagcagcggcaggctgccgatagccgccgttctcggcggtgttggccgttctacttcatgtatgcagtgcctacaaactaatgccggtcgcgtgcgcggctcgaatcgtgccggcggagctggcggcggccgcgaacaacacattttgccacattatctagatctagacctgagggtcgatactggcagcggcaggctgccgatagccgccgttctcggcggtgttggccgttctacttcatgtatgcagtgcctacaaaataatgccggtcgcgtgcgcggctcgaatcgtgccggcggagctggcggcggccgcgaacaacacattttgccacattatctagatctagacctgagggtcgatactggcagcggcaggctgccgatagccgccgttctcggcggtgttggccgttctacttcatgtatgcagtgcctacaaactaatgccggtcgcgtgcgcggctcgaatcgtgccggcggagctggcggcggccgcgaacaacacattttgccacattatctagatctagacctgagggtcgatactggcagcggcaggctgccgatagccgccgttctcggcggtgttggccgttctacttcatgtatgcagtgcctacaaactaatgccggtcgcgtgcgcggctcgaatcgtgccggcggagctggcggcggccgcgaacaacacattttgccacattatctagatctagacctgagggtcgatactggcagcggcaggctgccgatagccgccgttctcggcggtgttggccattcaacttcatgtatgcagtgcctacaaactaatgccggtcgcgtgcgcggctcgaatcgtgccggcggagctggcggcggccgcgaacaacacattttgccacattatctagatctagacctgagggtcgatactggcagcggcaggctgccgatagccgccgttctcggcggtgttggccgttctacttcatgtatgcagtgcctacaaactaatgccggtcgcgtgcgcggctcgaatcgtgccggcggagctggcggcggccgcgaacaacacattttgccacattatctagatctagacctgagggtcgatactggcagcggcaggctgccgatagccgccgttctcggcggtgttggccgttctacttcatgtatgcagtgcctacaaactaatgccggtcgcgtgcgcggctcgaatcgtgccggcggagctggcggcggccgcgaacaacacattttgccacattatctagatctagacctgagggtcgatactggcagcggcaggctgccgatagccgccgttctcggcggtgttggccgttcaacttcatgtatgcagtgcctacaaactaatgccggtcgcgtgcgcggctcgaatcgtgccggcggagctggcggcggccgcgaacaacacattttgccacattttcaaaatctagacctgagggtcgatactagcagcggcaggctgccgatagccgccgttctcggcggtgttggccgttctacttcatgtatgcagtgcctacaaactaatgccggtcgcgtgcgcggctcgaatcgtgccggcggagctggcggcggccgcgaacaacacattttgccacattatctagatctagacctgagggtcgatactggcagcggcaggctgccgatagccgccgttctcggcggtgttggccattcaacttcatgtatgcagtgcctacaaactaatgccggtcgcgtgcgcggctcgaatcgtgccggcagagctggcggcggccgcgaacaacacattttgccacattatctagatctagacctgagggtcgatactggcagcggcaggctgccgatagccgccgttctcggcggtgttggccgttctactttacgtatgcagtgcctacaaactaatgccggtcgcgtgcgcggctcgaatcgtgccggcggagctggcggcggccgcgaacaacacattttgccacattatctagatctagacctgagggtcgatactagcagcggcaggctgccgatagccgccgttctcggcggtgttggccgttctacttcatgtatgcagtgcgtacaaactaatgccggtcgcgtgcgcggctcgaatcgtgccggcggagctggcggcggccgcgaacaacacattttgccacattatctagatctagacctgagggtcgatactggcagcggcaggctgccgatagccgccgttctcggcggtgttggccgttctacttcatgtatgcagtgcctacaaactaatgccggtcgcgtgcgcggctcgaatcgtgccggcggagctggcggcggccgcgaacaacacattttgccacattatctagatctagacctgagggtcgatactagcagcggcaggctgccgatagccgccgttctcggcggtgttggccgttctacttcatgtatgcagtgcctacaaactattaccggtcgcgtgcgcggctcgaatcgtgccggcggagctggcggcggtggcgaacaacacattttgccacattttcaaaatctagacctgagggtcgatactggcagcggcaggctgccgatagccgccgttctcggcggtgttggccgttctactttacgtatgcagtgcctacaaactaatgccggtcgcgtgcgcggctcgaatcgtgccggcggagctggcggcggccgcgaacaacacattttgccacattatctagatctagacctgagggtcgatactggcagcggcaggctgccgatagccgccgttctcggcggtgttggccgttctacttcatgtatgcagtgcctacaaactattgccggtcgcgtgcgcggctcgaatcgtgccggcggagctggcggcggccgcgaacaacacattttgccacattatctagatctagacctgagggtcgatactagcagcggcaggctgccgatagccgccgttctcggcggtgttggccgttcaacttcatgtatgcagtgcctacaaacaattgccggtcgcgtgcgcggctcgaatcgtgccggcggagctggcggcggccgcgaacaacacattttgccacattatctagatctagacctgagggtcgatactggcagcggcaggctgccgatagccgccgttctcggcggtgttggccgttctacttcatgtatgcagtgcctacaaactattgccggtcgcgtgcgcggctcgaatcgtgccggcggagctggcggcggccgcgaacaacacattttgccacattatctagatctagacctgagggtcgatactggcagcggcaggctgccgatagccgccgttctcggcggtgttggccgttctactttacgtatgcagtgcctacaaactaatgccggtcgcgtgcgcggctcgaatcgtgccggcggagctggcggcggccgcgaacaacacattttgccacattatctagatctagacctgagggtcgatactggcagcggcaggctgccgatagccgccgttctcggcggtgttggccgttctacttcatgtatgcagtgcctacaaactattgccggtcgcgtgcgcggctcgaatcgtgccggcggagctggcggcggccgcgaacaacacattttgccacattatctagatctagacctgagggtcgatactggcagcggcaggctgccgatagccgccgttctcggcggtgttggccgttctactttacgtatgcagtgcctacaaactaatgccggtcgcgtgcgcgtctcgaatcgtgccggcggagctgacggcggccgcgaacaacacattttgccacattatctagatctagacctgagggtcgatactagcagcggcaggctgccgatagccgccgttctcggcggtgttggccgttcaacttcatgtatgcagtgcctacaaactaatgccggtcgcgtgcgcggctcgaatcgtgccggcggagctggcggcggccgcgaacaacacattttgccacattatctagatctagacctgagggtcgatactggcagcggcaggctgccgatagccgccgttctcggcggtgttggccgttctactttacgtatgcagtgcctacaaactaatgccggtcgcgtgcgcgtctcgaatcgtgccggcggagctggcggcggccgcgaacaacacattttgccacattatctagatctagacctgagggtcgatactggcagcggcaggctgccgatagccgccgttctcggcggtgttggccgttctacttcatgtatgcagtgcctacaaactaatgccggtcgcgtgcgcggctcgaatcgtgccggcggagctggcggcggccgcgaacaacacattttgccacattatcaaaatctagacctgagggtcgatactggcagcggcaggctgccgatagccgccgttctcggcggtgttggccgttctacttcatgtatgcagtgcctacaaaataatgccggtcgcgtgcgcggctcgaatcgtgccggcggagctggcggcggccgcgaacaacacattttgccacattatctagatctagacctgagggtcgatactggcagcggcaggctgccgatagccgccgttctcggcggtgttggccgttctactttacgtatgcagtgcctacaaactaatgccggtcgcgtgcgcgtctcgaatcgtgccggcggagctggcggcggccgcgaacaacacattttgccacattatctagatctagacctgagggtcgatactggcagcggcaggctgccgatagccgccgttctcggcggtgttggccgttcaactttatgtatgcagtgcctacaaacaattgccggtcgcgtgcgcggctcgaatcgtgccggcggagctggcggcggccgcgaacaacacattttgccacattatctagatctagacctgagggtcgatactggcagcggcaggctgccgatagccgccgttctcggcggtgttggccgttctactttacgtatgcagtgcctacaaactaatgccggtcgcgtgcgcgtctcgaatcgtgccggcggagctggcggcggccgcgaacaacacattttgccacattatctagatctagacctgagggtcgatactggcagcggcaggctgccgatagccgccgttctcggcggtgttggccgttctacttcatgtatgcagtgcctacaaactaatgccggtcgcgtgcgcgtctcgaatcgtgccggcggagctggcggcggccgcgaacaacacattttgccacattatctagatctagacctgagggtcgatactggcagcggcaggctgccgatagccgccgttctcggcggtgttggccgttcaactttatgtatgcagtgcctacaaactaatgccggtcgcgtgcgcggctcgaatcgtgccggcggagctggcggcggccgcgaacaacacattttgccacattatctagatctagacctgagggtcgatactggcagcggcaggctgccgatagccgccgttctcggcggtgttggccgttctactttacgtatgcagtgcctacaaactaatgccggtcgcgtgcgcgtctcgaatcgtgccggcggagctggcggcggccgcgaacaacacattttgccacattatctagatctagacctgagggtcgatactggcagcggcaggctgccgatagccgccgttctcggcggtgttggccgttctactttacgtatgcagtgcctacaaactaatgccggtcgcgtgcgcgtctcgaatcgtgccggcggagctggcggcggcgaatcgtgccggcggagctggcggcggccgcgaacaacacattttgccacattatctagatctagacctgagggtcgatactggcagcggcaggctgccgatagccgccgttctcggcggtgttggccgttcacattttgccacattatctagatctagacctgagggtcgatactggcagcggcaggctgccgatagccgccgttctcggcggtgttggccgttctacttcatgtatgcagtgcctacaaactattgccggtcgcgtgcgcggctcgaatcgtgccggcggagctggcggcggccgcgaacaacacattttgccacattatctagatctagacctgagggtcgatactggcagcggcaggctgccgatagccgccgttctcggcggtgttggccgttcaactttatgtatgcagtgcctacaaactaatgccggtcgcgtgcgcggctcgaatcgtgccggcggagctggcggcggccgcgaacaacacattttgccacattatctagatctagacctgagggtcgatactggcagcggcaggctgccgatagccgccgttctcggcggtgttggccgttcaactttatgtatgcagtgcctacaaactaatgccggtcgcgtgcgcggctcgaatcgtgccggcggagctggcggcggccgcgaacaacacattttgccacattatctagatctagacctgagggtcgatactggcagcggcaggctgccgatagccgccgttctcggcggtgttggccgttctactttacgtatgcagtgcctacaaactaatgccggtcgcgtgcgcgtctcgaatcgtgccggcggagctggcggcggccgcgaacaacacattttgccacattatctagatctagacctgagggtcgatactagcagcggcaggctgccgatagccgccgttctcggcggtgttggccgttctacttcatgtatgcagtgcctacaaactaatgccggtcgcgtgcgcggctcgaatcgtgccggcggagctggcggcggccgcgaacaacacattttgccacattatctagatctagacctgagggtcgatactggcagcggcaggctgccgatagccgccgttctcggcggtgttggccgttctacttcatgtatgcagtgcctacaaactaatgccggtcgcgtgcgcggctcgaatcgtgccggcggagctggcggcggccgcgaacaacacattttgccacattatcaaaatctagacctgagggtcgatactggcagcggcaggctgccgatagccgccgttctcggcggtgttggccgttctacttcatgtatgcagtgcctacaaacaattgccggtcgcgtgcgcggctcgaatcgtgccggcggagctggcggcggccgcgaacaacacattttgccacattatctagatctagacctgagggtcgatactggcagcggcaggctgccgacagccgccgttctcggcggtgttggccgttctacttcatgtatgcagtgcctacaaacaattgccggtcgcgtgcgcggctcgaatcgtgccggcggagctggcggcggccgcgaacaacacattttgccacattatctagatctagacctgagggtcgatactggcagcggcaggctgccgatagccgccgttctcggcggtgttggccgttctacttcatgtatgcagtgcctacaaactaatgccggtcgcgtgcgcgtctcgaatcgtgccggcggagctggcggcggccgcgaacaacacattttgccacattatctagatctagacctgagggtcgatactagcagcggcaggctgccgatagccgccgttctcggcggtgttggccgttctactttacgtatgcagtgcctacaaactaatgccggtcgcgtgcgcggctcgaatcgtgccggcggagctggcggcggccgcgaacaacacattttgccacattatctagatctagacctgagggtcgatactagcagcggcaggctgccgatagccgccgttctcggcggtgttggccgttctacttcatgtatgcagtgcctacaaacaattgccggtcgcgtgcgcggctcgaatcgtgccggcggagctggcggcggccgcgaacaacacattttgccacattttcaaaatctagacctgagggtcgatactggcagcggcaggctgccgatagccgccgttctcggcggtgttggccgttctacttcatgtatgcagtgcgtacaaactaatgccggtcgcgtgcgcgtctcgaatcgtgccggcggagctggcggcggccgcgaacaacacattttgccacattatctagatctagacctgagggtcgatactggcagcggcaggctgccgatagccgccgttctcggcggtgttggccgttctactttacgtatgcagtgcctacaaacaattgccggtcgcgtgcgcggctcgaatcgtgccggcggagctggcggcggccgcgaacaacacattttgccacattatctagatctagacctgagggtcgatactggcagcggcaggctgccgatagccgccgttctcggcggtgttggccgttctactttacgtatgcagtgcctacaaactattgccggtcgcgtgcgcggctcgaatcgtgccggcggagctggcggcggccgcgaacaacacattttgccacattatctagatctagacctgagggtcgatactagcagcggcaggctgccgatacccgccgttctcggcggtgttggccgttctacttcatgtatgcagtgcctacaaacaattgccggtcgcgtgcgcggctcgaatcgtgccggcggagctggcggcggccgcgaacaacacattttgccacattatctagatctagacctgagggtcgatactggcagcggcaggctgccgatagccgccgttctcggcggtgttggccgttctacttcatgtatgcagtgcgtacaaactaatgccggtcgcgtgcgcgtctcgaatcgtgccggcggagctggcggcggccgcgaacaacacattttgccacattatctagatctagacctgagggtcgatactggcagcggcaggctgccgatagccgccgttctcggcggtgttggccgttctactttacgtatgcagtgcctataaactaatgccgatcgcgtgcgcggctcgaagcgtgccgtcggagctggcggcggccgcgaacaacacattttgccacattatctagatctagacctgagggtcgatactggcagcggcaggctgccgatagccgccgttctcggcggtgttggccgttctactttacgtatgcagtgcctacaaacaattgccggtcgcgtgcgcggctcgaatcgtgccgtcggagctggcggcggccgcgaacaacacattttgccacattatctagatctagacctgagggtcgatactggcagcggcaggctgccgatagccgcccttctcggcggtgttggccgttcaacttcatgtatgcagtgcctacaaactaatgccggtcgcgtgcgcggctcgaatcgtgccggcggagctggcggcggccgcgaacaacacattttgccacattttcaaaatctagacctgagggtcgatactggcagcggcaggctgccgatagccgccgttctcggcggtgttggccgttctactttacgtatgcagtgcctacaaactattgccggtcgcgtgcgcggctcgaatcgtgccggcggagctggcggcggccgcgaacaacacattttgccacattatctagatctagacctgagggtcgatactggcagcggcaggctgccgatagccgccgttctcggcggtgttggccgttctactttacgtatgcagtgcctacaaacaattgccggtcgcgtgcgcggctcgaatcgtgccggcggagctggcggcggccgcgaacaacacattttgccacattatctagatctagacctgagggtcgatactagcagcggcaggctgccgatacccgccgttctcggcggtgttggccgttctacttcatgtatgcagtgcctacaaacaattgccggtcgcgtgcgcggctcgaatcgtgccggcggagctggcggcggccgcgaacaacacattttgccacattatctagatctagacctgagggtcgatactggcagcggcaggctgccgatagccgccgttctcggcggtgttggccgttctacttcatgtatgcagtgcgtacaaactaatgccggtcgcgtgcgcgtctcgaatcgtgccggcggagctggcggcggccgcgaacaacacattttgccacattatctagatctagacctgagggtcgatactggcagcggcaggctgccgatagccgccgttctcggcggtgttggccgttctactttacgtatgcagtgcctataaactaatgccgatcgcgtgcgcggctcgaagcgtgccgtcggagctggcggcggccgcgaacaacacattttgccacattatctagatctagacctgagggtcgatactggcagcggcaggctgccgatagccgccgttctcggcggtgttggccgttctactttacgtatgcagtgcctacaaactattgccggtcgcgtgcgcggctcgaatcgtgccggcggagctggcggcggccgcgaacaacacattttgccacattatctagatctagacctgagggtcgatactggcagcggcaggctgccgatacccgccgttctcggcggtgttggccgttctacttcatgtatgcagtgcctacaaacaattgccggtcgcgtgcgcggctcgaatcgtgccgtcggagctggcggcggccgcgaacaacacattttgccacattatctagatctagacctgagggtcgatactggcagcggcaggctgccgatagccgcccttctcggcggtgttggccgttctactttacgtatgcagtgcctacaaattaatgccggtcgcgtgcgcggctcgaatcgtgccggcggagctggcggcggccgcgaacaacacattttgccacattttcaaaatctagacctgagggtcgatactggcagcggcaggctgccgatagccgccgttctcggcggtgttggccgttcaacttcatgtatgcagtgcctacaaactaatgccggtcgcgtgcgcggctcgaatcgtgccggcggagctggcggcggccgcgaacaacacattttgccacattttcaaaatctagacctgagggtcgatactggcagcggcaggctgccgatagccgccgttctcggcggtgttggccgttcaacttcatgtatgcagtgcctacaaactaatgccggtcgcgtgcgcggctcgaatcgtgccggcggagctggcggcggccgcgaacaacacattttgccacattttcaaaatctagacctgagggtcgatactggcagcggcaggctgccgatagccgccgttctcggcggtgttggccgttcaacttcatgtatgcagtgcctacaaactaatgccggtcgcgtgcgcggctcgaatcgtgccggcggagctggcggcggccgcgaacaacacattttgccacattttcaaaatctagacctgagggtcgatactggcagcggcaggctgccgatagccgccgttctcggcggtgttggccgttctacttcatgtatgcagtgcgtacaaactaatgccggtcgcgtgcgcgtctcgaatcgtgccggcggagctgacggcggccgcgaacaacacattttgccacattatctagatctagacctgagggtcgatactagcagcggcaggctgccgatagccgccgttctcggcggtgttggccgttctacttcatgtatgcagtgcctacaaacaattgccggtcgcgtgcgcggctcgaatcgtgccggcggagctggcggcggccgcgaacaacacattttgccacattatctagatctagacctgagggtcgatactggcagcggcaggctgccgatagccgccgttctcggcggtgttggccgttcaacttcatgtatgcagtgcctacaaactaatgccggtcgcgtgcgcggctcgaatcgtgccggcggagctggcggcggccgcgaacaacacattttgccacattatctagatctagacctgagggtcgatactggcagcggcaggctgccgatagccgccgttctcggcggtgttggccgttctacttcatgtatgcagtgcctacaaactaatgccggtcgcgtgcgcggctcgaagcgtgccggcggagctggcggcggccgcgaacaacacattttgccacattatctagatctagacctgagggtcgatactagcagcggcaggctgccgatagccgccgttctcggcggtgttggccgttcaacttcatgtatgcagtgcctacaaacaattgccggtcgcgtgcgcggctcgaatcgtgccggcggagctggcggcggccgcgaacaacacattttgccacattatctagatctagacctgagggtcgatactggcagcggcaggctgccgatagccgccgttctcggcggtgttggccgttctacttcatgtatgcagtgcctacaaactaatgccggtcgcgtgcgcggctcgaatcgtgccggcggagctggcggcggccgcgaacaacacattttgccacattatctagatctagacctgagggtcgatactagcagcggcaggctgccgatagccgccgttctcggcggtgttggccgttctacttcatgtatgcagtgcctacaaactattaccggtcgcgtgcgcggctcgaatcgtgccggcggagctggcggcggccgcgaacaacacattttgccacattttcaaaatctagacctgagggtcgatactggcagcggcaggctgccgatagccgccgttctcggcggtgttggccgttctacttcatgtatgcagtgcctacaaacaattgccggtcgcgtgcgcggctcgaatcgtgccggcggagctggcggcggccgcgaacaacacattttgccacattttcaaaatctagacctgagggtcgatactggcagcggcaggctgccgatagccgccgttctcggcggtgttggccattctacttcatgtatgcagtgcctacaaacaattgccggtcgcgtgcgaggctcgaatcgtgccggcggagctggcggcggccgcgaacaacacattttgccacattatctagatctagacctgagggtcgatactagcagcggcaggctgccgatagccgccgttctcggcggtgttggccgttcaacttcatgtatgcagtgcctacaaacaattgccggtcgcgtgcgcggctcgaatcgtgccggcggagctggcggcggccgcgaacaacacattttgccacattatctagatctagacctgagggtcgatactggcagcggcaggctgccgatagccgccgttctcggcggtgttggccgttctacttcatgtatgcagtgcctacaaactaatgccggtcgcgtgcgcggctcgaatcgtgccggcggagctggcggcggccgcgaacaacacattttgccacattatctagatctagacctgagggtcgatactagcagcggcaggctgccgatagccgccgttctcggcggtgttggccgttctacttcatgtatgcagtgcctacaaactattaccggtcgcgtgcgcggctcgaatcgtgccggcggagctggcggcggtggcgaacaacacattttgccacattttcaaaatctagacctgagggtcgatactggcagcggcaggctgccgatagccgccgttctcggcggtgttggccgttctacttcatgtatgcagtgcctacaaactaatgccggtcgcgtgcgcgtctcgaatcgtgccggcggagctggcggcggccgcgaacaacacattttgccacattatctagatctagacctgagggtcgatactggcagcggcaggctgccgacagccgccgttctcggcggtgttggccgttctacttcatgtatgcagtgcctacaaacaattgccggtcgcgtgcgcggctcgaatcgtgccggcggagctggcggcggccgcgaacaacacattttgccacattatctagatctagacctgagggtcgatactagcagcggcaggctgccgatagccgccgttctcggcggtgttggccgttcaacttcatgtatgcagtgcctacaaactaatgccggtcgcgtgcgcggctcgaatcgtgccggcggagctggcggcggccgcgaacaacacattttgccacattatctagatctagacctgagggtcgatactagcagcggcaggctgccgacagccgccgttctcggcggtgttggccgttctacttcatgtatgcagtgcctacaaacaattgccggtcgcgtgcgcggctcgaatcgtgccggcggagctggcggcggccgcgaacaacacattttgccacattatctagatctagacctgagggtcgatactggcagcggcaggctgccgatagccgccgttctcggcggtgttggccgttctacttcatgtatgcagtgcctacaaacaattgccggtcgcgtgcgcggctcgaatcgtgctgtcggagctggcggcggccgcgaacaacacattttgccacattatctagatctagacctgagggtcgatactggcagcggcaggctgccgatagccgccgttctcggcggtgttggccgttctacttcaagtatgcagtgcctacaaactaatgccggtcgcgtgcgcgtctcgaatcgtgccggcggagctggcggcggtggcgaacaacacattttgccacattttcaaaatctagacctgagggtcgatactggcagcggcaggctgccgatagccgccgttctcggcggtgttggccgttctacttcatgtatgcagtgcctacaaactattgccggtcgcgtgcgcggctcgaatcgtgccggcggagctggcggcggccgcgaacaacacattttgccacattatctagatctagacctgagggtcgatactagcagcggcaggctgccgatagccgccgttctcggcggtgttggccattctactttacgtatgcagtgcctacaaactaatgccggtcgcgtgcgcggctcgaatcgtgccggcggagctggcggcggccgcgaacaacacattttgccacattatctagatctagacctgagggtcgatactagcagcggcaggctgccgacagccgccgttctcggcggtgttggccgttctacttcatgtatgcagtgcctacaaacaattgccggtcgcgtgcgcggctcgaatcgtgccggcggagctggcggcggccgcgaacaacacattttgccacattatctagatctagacctgagggtcgatactagcagcggcaggctgccgatagccgccgttctcggcggtgttggccgttcaacttcatgtatgcagtgcctacaaactaatgccggtcgcgtgcgcggctcgaatcgtgccggcggagctggcggcggccgcgaacaacacattttgccacattatctagatctagacctgagggtcgatactggcagcggcaggctgccgatagccgccgttctcggcggtgttggccgttctacttcatgtatgcagtgcctacaaacaattgccggtcgcgtgcgcgtctcgaatcgtgccggcggagctggcggcggccgcgaacaacacattttgccacattatctagatctagacctgagggtcgatactagcagcggcaggctgccgatagccgccgttctcggcggtgttggccgttctactttacgtatgcagtgcctacaaacaattgccggtcgcgtgcgcgtctcgaatcgtgccggcggagctggcggcggccgcgaacaacacattttgccacattatctagatctagacctgagggtcgatactagcagcggcaggctgccgatagccgccgttctcggcggtgttggccgttctactttacgtatgcagtgcctacaaacaattgccggtcgcgtgcgcggctcgaatcgtgccggcggagctggcggcggccgcgaacaacacattttgccacattatctagatctagacctgagggtcgatactagcagcggcaggctgccgatagccgccgttctcggcggtgttggccgttctactttacgtatgcagtgcctacaaacaattgccggtcgcgtgcgcggctcgaatcgtgccgtcggagctggcggcggccgcgaacaacacattttgccacattatctagatctagacctgagggtcgatactggcagcggcaggctgccgatagccgcccttctcggcggtgttggccgttcaacttcatgtatgcagtgcctacaaacaattgccggtcgcgtgcgcggctcgaatcgtgccggcggagctggcggcggccgcgaacaacacattttgccacattttcaaaatctagacctgagggtcgatactggcagcggcaggctgccgatagccgccgttctcggcggtgttggccgttctacttcatgtatgcagtgcctacaaactaatgccggtcgcgtgcgcggctcgaagcgtgccgtcggagctggcggcggccgcgaacaacacattttgccacattatctagatctagacctgagggtcgatactggcagcggcaggctgccgatagccgccgttctcggcggtgttggccgttctacttcatgtatgcagtgcctacaaacaattgccggtcgcgtgcgcggctcgaatcgtgccggcggagctggcggcggccgcgaacaacacattttgccacattatctagatctagacctgagggtcgatactggcagcggcaggctgccgatagccgccgttctcggcggtgttggccgttcaacttcatgtatgcagtgcctacaaactaatgccggtcgcgtgcgcggctcgaatcgtgccggcggagctggcggcggccgcgaacaacacattttgccacattttcaaaatctagacctgagggtcgatactggcagcggcaggctgccgatagccgccgttctcggcggtgttggccgttcaacttcatgtatgcagtgcctacaaactaatgccggtcgcgtgcgcggctcgaagcgtgccgtcggagctggcggcggccgcgaacaacacattttgccacattatctagatctagacctgagggtcgatactagcagcggcaggctgccgatagccgccgttctcggcggtgttggccgttcaacttcatgtatgcagtgcctacatactaatgccggtcgcgtgcgcggctcgaatcgtgccggcggagctggcggcggccgcgaacaacacattttgccacattatctagatctagacctgagggtcgatactggcagcggcaggctgccgatagccgccgttctcggcggtgttggccgttctacttcatgtatgcagtgcctacaaacaattgccggtcgcgtgcgcggctcgaatcgtgccggcggagctggcggcggccgcgaacaacacattttgccacattatctagatctagacctgagggtcgatactggcagcggcaggctgccgatagccgccgttctcggcggtgttggccgttcaacttcatgtatgcagtgcctacaaactaatgccggtcgcgtgcgcggctcgaatcgtgccggcggagctggcggcggccgcgaacaacacattttgccacattttcaaaatctagacctgagggtcgatactggcagcggcaggctgccgatagccgccgttctcggcggtgttggccgttcaacttcatgtatgcagtgcctacaaactaatgccggtcgcgtgcgcggctcgaatcgtgccggcggagctggcggcggccgcgaacaacacattttgccacattatctagatctagacctgagggtcgatactggcagcggcaggctgccgatagccgccgttctcggcggtgttggccgttctacttcatgtatgcagtgcctacaaacaattgccggtcgcgtgcgcggctcgaatcgtgccggcggagctggcggcggccgcgaacaacacattttgccacattatctagatctagacctgagggtcgatactggcagcggcaggctgccgatagccgccgttctcggcggtgttggccgttctacttcatgtatgcagtgcctacaaactaatgccggtcgcgtgcgcggctcgaatcgtgccggcggagctggcggcggccgcgaacaacacattttgccacattatctagatctagacctgagggtcgatactggcagcggcaggctgccgatagccgccgttctcggcggtgttggccgttctacttcatgtatgcagtgcctacaaacaattgccggtcgcgtgcgcggctcgaatcgtgccggcggagctggcggcggccgcgaacaacacattttgccacattatctagatctagacctgagggtcgatactggcagcggcaggctgccgatagccgccgttctcggcggtgttggccgttctacttcatgtatgcagtgcgtacaaactaatgccggtcgcgtgcgcgtctcgaatcgtgccggcggagctggcggcggccgcgaacaacacattttgccacattatctagatctagacctgagggtcgatactggcagcggcaggctgccgatagccgccgttctcggcggtgttggccgttctactttacgtatgcagtgcctacaaacaattgccggtcgcgtgcgcggctcgaatcgtgccggcggagctggcggcggccgcgaacaacacattttgccacattatctagatctagacctgagggtcgatactggcagcggcaggctgccgatagccgccgttctcggcggtgttggccgttctacttcatgtatgcagtgcctacaaactaatgccggtcgcgtgcgcggctcgaatcgtgccggcggagctggcggcggccgcgaacaacacattttgccacattatctagatctagacctgagggtcgatactagcagcggcaggctgccgatagccgccgttctcggcggtgttggccgttctacttcatgtatgcagtgcctacaaactattgccggtcgcgtgcgcggctcgaatcgtgccggcggagctggcggcggccgcgaacaacacattttgccacattatctaaatctagacctgagggtcgatactggcagcggcaggctgccgatagccgccgttctcggnnnnnnnnnnnnnnnnnnnnnnnnnnnnnnnnnnnnnnnnnnnnnnnnnnnnnnnnnnnnnnnnnnnnnnnnnnnnnnnnnnnnnnnnnnnnnnnnnnnnaaactaatgccggtcgcgtgcgcggctcgaatcgtgccggcagagctggcggcggccgcgaacaacacattttgccacattatctagatctagacctgagggtcgatactggcagcggcaggctgccgatagccgccgttctcggcggtgttggccgttctacttcacgtatgcagtgcgtacaaactaatgccggtcgcgtgcgcggctcgaatcgtgccggcggagctggcggcggccgcgaacaacacattttgccacattatctagatctagacctgagggtcgatactggcagcggcaggctgccgatagccgccgttctcggcggtgttggccattctactttacgtatgcagtgcctacaaactaatgccggtcgcgtgcgcggctcgaatcgtgccggcggagctggcggcggccgcgaacaacacattttgccacattttcaaaatctagacctgagggtcgatactggcagcggcaggctgccgacagccgccgttctcggcggtgttggccgttctacttcatgtatgcagtgcctacaaactaatgccggtcgcgtgcgcggctcgaagcgtgccggcggagctggcggcggccgcgaacaacacattttgccacattttcaaaatctagacctgagggtcgatactggcagcggcaggctgccgatagccgccgttctcggcggtgttggccattctactttacgtatgcagtgcctacaaactaatgccggtcgcgtgcgcggctcgaatcgtgccggcggagctggcggcggccgcgaacaacacattttgccacattatctagatctagacctgagggtcgatactggcagcggcaggctgccgatagccgccgttctcggcggtgttggccgttctactttacgtatgcagtgcctacaaactaatgccggccgcgtgcgcggctcgaagcgtgcaggcggagctggcggcggccgcgaacaacacattttgccacattatctagatctagacctgagggtcgatactggcagcggcaggctgccgatagccgccgttctcggcggtgttggccgttctactttacgtatgcagtgcctacaaactaatgccggtcgcgtgcgcggctcgaagcgtgccggcggagctggcggcggccgcgaacaacacattttgccacattatctagatctagacctgagggtcgatactggcagcggcaggctgccgatagccgccgttctcggcggtgttggccattctacttcatgtatgcagtgcctacaaactaatgccggtcgcgtgcgcggctcgaagcgtgccggcggagctggcggcggccgcgaacaacacattttgccacattatctagatctagacctgagggtcgatactggcagcggcaggctgccgatagccgccgttctcggcggtgttggccgttctacttcatgtatgcagtgcctacaaactaatgccggtcgcgtgcgcggctcgaatcgtgccggcggagctggcggcggccgcgaacaacacattttgccacattatctagatctagacctgagggtcgatactggcagcggcaggctgccgatagccgccgttctcggcggtgttggccattctactttacgtatgcagtgcctacaaactaatgccggtcgcgtgcgcggctcgaagcgtgccggcggagctggcggtggccgcgaacaacacattttgccacattttcaaaatctagacctgagggtcgatactggcagcggcaggctgccgatagccgccgttctcggcggtgttggccattctactttacgtatgcagtgcctacaaactaatgccggtcgcgtgcgcggctcgaagcgtgccggcggagctggcggcggccgcgaacaacacattttgccacattatctagatctagacctgagggtcgatactggcagcggcaggctgccgatagccgccgttctcggcggtgttggccattctacttcatgtatgcagtgcctacaaactaatgccggtcgcgtgcgcggctcgaagcgtgccggcggagctggcggcggccgcgaacaacacattttgccacattatctaaatctagacctgagggtcgatactggcagcggcaggctgccgatagccgccgttctcggcggtgttggccgttctacttcatgtatgcagtgcctacaaactaatgccggtcgcgtgcgcggctcgaatcgtgccggcggagctggcggcggccgcgaacaacacattttgccacattatctagatctagacctgagggtcgatactggcagcggcaggctgccgatagccgccgttctcggcggtgttggccgttctacttcatgtatgcagtgcctacaaactattgccggtcgcgtgcgcggctcgaatcgtgccggcggagctggcggcggccgcgaacaacacattttgccacattatctagatctagacctgagggtcgatactggcagcggcaggctgccgatagccgccgttctcggcggtgttggccgatctacttcatgtatgcagtgcctacaaactaatgccggtcgcgtgcgcggctcgaagcgtgccggcggagctgccggcggccgcgaacaacacattttgccacattatctagatctagacctgagggtcgatactggcagcggcaggctgccgatagccgccgttctcggcggtgttggccgatctacttcatgtatgcagtgcctacaaactaatgccggtcgcgtgcgcggctcgaatcgtgccggcggagctggcggcggccgcgaacaacacattttgccacattttcaaaatctagacctgagggtcgatactggcagcggcaggctgccgatagccgccgttctcggcggtgttggccgttctacttcatgtatgcagtgcctacaaactaatgccggtcgcatgcgcggcttgaatcgtgccggcggagctggcggcggccgcgaacaacacattttgccacattatctagatctagacctgagggtcgatactggcagcggcaggctgccgatagccgccgttctcggcggtgttggccgatctacttcatgtatgcagtgcctacaaactaatgccggtcgcgtgcgcggctcgaatcgtgccggcggagctggcggcggccgcgaacaacacattttgccacattatctagatctagacctgagggtcgatactggcagcggcaggctgccgatagccgccgttctcggcggtgttggccgttctacttcatgtatgcagtgcctacaaactaatgccggtcgcgtgcgcggctcgaatcgtgccggcggagctggcggcggccgcgaacaacacattttgccacattatctagatctagacctgagggtcgatactggcagcggcaggctgccgatagccgccgttctcggcggtgttggccgttctacttcatgtatgcagtgcctacaaactaatgccggtcgcgtgcgcggctcgaagcgtgccggcggagctggcggcggccgcgaacaacacattttgccacattatctagatctagacctgagggtcgatactggcagcggcaggctgccgatagccgccgttctcggcggtgttggccgttctacttcatgtatgcagtgcctacaaactaatgccggtcgcgtgcgcggctcgaagcgtgccggcggagctggcggcggccgcgaacaacacattttgccacattatctagatctagacctgagggtcgatactggcagcggcaggctgccgatagccgccgttctcggcggtgttggccgttctacttcatgtatgcagtgcctacaaactaatgccggtcgcgtgcgcggctcgaatcgtgccggcggagctggcggcggccgcgaacaacacattttgccacattatctagatctagacctgagggtcgatactggcagcggcaggctgccgatagccgccgttctcggcggtgttggccattctactttacgtatgcagtgcctacaaactattgccggtcgcgtgcgcggctcgaatcgtgccggcggagctggcggcggccgcgaacaacacattttgccacattttcaaaatctagacctgagggtcgatactggcagcggcaggctgccgatagccgccgttctcggcggtgttggccattctactttacgtatgcagtgcctacaaactaatgccggtcgcgtgcgcggctcgaatcgtgccggcggagctggcggcggccgcgaacaacacattttgccacattatctagatctagacctgagggtcgatactggcagctgcaggctgccgatagccaccgttctcggcggtgttggccgttctacttcatgtatgcagtgcctacaaactaatgccggtcgcgtgcgcggctcgaagcgtgccggcggagctggcggcggccgcgaacaacacattttgccacattatctagatctagacctgagggtcgatactggcagcggcaggctgccgatagccgccgttctcggcggtgttggccgttctacttcatgtatgcagtgcctacaaactaatgccggtcgcgtgcgcggctcgaatcgtgccggcggagctggcggcggccgcgaacaacacattttgccacattatctagatctagacctgagggtcgatactggcagcggcaggctgccgatagccgccgttctcggcggtgttggccgttctacttcatgtatgcagtgcctacaaactaatgccggtcgcgtgcgcggctcgaatcgtgccggcggagctggcggcggccgcgaacaacacattttgccacattatctagatctagacctgagggtcgatactggcagcggcaggctgccgatagccgccgttctcggcggtgttggccattctacttcatgtatgcagtgcctacaaactaatgccggtcgcgtgcgcggctcgaatcgtgccggcacagctggcggcggccgcgaacaacacattttgccacattatctagatctagacctgagggtcgatactggcagcggcaggctgccgatagccgccgttctcggcggtgttggccgttctacttcatgtatgcagtgcctacaaactaatgccggtcgcgtgcgcggctcgaatcgtgccggcggagctgacggcggccgcgaacaacacattttgccacattatctagatctagacctgagggtcgatactagcagcggcaggctgccgacagccgccgttctcggcggtgttggccgttctacttcatgtatgcagtgcctacaaacaattgccggtcgcgtgcgcggctcgaatcgtgccggcggagctggcggcggccgcgaacaacacattttgccacattatctagatctagacctgagggtcgatactggcagcggcaggctgccgatagccgccgttctcggcggtgttggccgttctacttcatgtatgcagtgcctacaaacaattgccggtcgcgtgcgcggctcgaatcgtgccggcggagctggcggcggccgcgaacaacacattttgccacattatctagatctagacctgagggtcgatactggcagcggcaggctgccgatagccgccgttctcggcggtgttggccgttctacttcatgtatgcagtgcctacaaactattgccggtcgcgtgcgcggctcgaatcgtgccggcggagctggcggcggccgcgaacaacacattttgccacattatctagatctagacctgagggtcgatactggcagcggcaggctgccgatagccgccgttctcggcggtgttggccgttctacttcatgtatgcagtgcctacaaacaattgccggtcgcgtgcgcgtctcgaatcgtgccggcggagctggcggcggccgcgaacaacacattttgccacattatctagatctagacctgagggtcgatactagcagcggcaggctgccgatagccgccgttctcggcggtgttggccgttctactttacgtatgcagtgcctacaaacaattgccggtcgcgtgcgcgtctcgaatcgtgccggcggagctggcggcggccgcgaacaacacattttgccacattatctagatctagacctgagggtcgatactagcagcggcaggctgccgatagccgccgttctcggcggtgttggccgttctactttacgtatgcagtgcctacaaacaattgccggtcgcgtgcgcggctcgaatcgtgccggcggagctggcggcggccgcgaacaacacattttgccacattatctagatctagacctgagggtcgatactagcagcggcaggctgccgatagccgccgttctcggcggtgttggccgttctacttcacgtatgcagtgcctacaaacaattgccggtcgcgtgcgcggctcgaatcgtgccggcggagctggcggcggccgcgaacaacacattttgccacattatctagatctagacctgagggtcgatactggcagcggcaggctgccgatagccgccgttctcggcggtgttggccgttctacttcatgtatgcagtgcctacaaactattgccggtcgcgtgcgcggctcgaatcgtgccggcggagctggcggcggccgcgaacaacacattttgccacattatctagatctagacctgagggtcgatactggcagcggcaggctgccgatagccgccgttctcggcggtgttggccgttcaactttatgtatgcagtgcctacaaactaatgccggtcgcgtgcgcggctcgaatcgtgccggcggagctggcggcggccgcgaacaacacattttgccacattatctagatctagacctgagggtcgatactggcagcggcaggctgccgatagccgccgttctcggcggtgttggccgttcaactttatgtatgcagtgcctacaaactaatgccggtcgcgtgcgcggctcgaatcgtgccggcggagctggcggcggccgcgaacaacacattttgccacattatctagatctagacctgagggtcgatactggcagcggcaggctgccgatagccgccgttctcggcggtgttggccgttctactttacgtatgcagtgcctacaaactaatgccggtcgcgtgcgcgtctcgaatcgtgccggcggagctggcggcggccgcgaacaacacattttgccacattatctagatctagacctgagggtcgatactggcagcggcaggctgccgatagccgccgttctcggcggtgttggccgttctactttacgtatgcagtgcctacaaactaatgccggtcgcgtgcgcgtctcgaatcgtgccggcggagctggcggcggcgaatcgtgccggcggagctggcggcggccgcgaacaacacattttgccacattatctagatctagacctgagggtcgatactggcagcggcaggctgccgatagccgccgttctcggcggtgttggccgttcacattttgccacattatctagatctagacctgagggtcgatactggcagcggcaggctgccgatagccgccgttctcggcggtgttggccgttctacttcatgtatgcagtgcctacaaactattgccggtcgcgtgcgcggctcgaatcgtgccggcggagctggcggcggccgcgaacaacacattttgccacattatctagatctagacctgagggtcgatactggcagcggcaggctgccgatagccgccgttctcggcggtgttggccgttcaactttatgtatgcagtgcctacaaactaatgccggtcgcgtgcgcggctcgaatcgtgccggcggagctggcggcggccgcgaacaacacattttgccacattatctagatctagacctgagggtcgatactggcagcggcaggctgccgatagccgccgttctcggcggtgttggccgttcaactttatgtatgcagtgcctacaaactaatgccggtcgcgtgcgcggctcgaatcgtgccggcggagctggcggcggccgcgaacaacacattttgccacattatctagatctagacctgagggtcgatactggcagcggcaggctgccgatagccgccgttctcggcggtgttggccgttctactttacgtatgcagtgcctacaaactaatgccggtcgcgtgcgcggctcgaatcgtgccggcggagctggcggcggccgcgaacaacacattttgccacattatctagatctagacctgagggtcgatactggcagcggcaggctgccgatagccgccgttctcggcggtgttggccgttctactttacgtatgcagtgcctacaaactaatgccggtcgcgtgcgcgtctcgaatcgtgccggcggagctggcggcggccgcgaacaacacattttgccacattatctagatctagacctgagggtcgatactagcagcggcaggctgccgatagccgccgttctcggcggtgttggccgttctacttcatgtatgcagtgcctacaaactaatgccggtcgcgtgcgcggctcgaatcgtgccggcggagctggcggcggccgcgaacaacacattttgccacattatctagatctagacctgagggtcgatactggcagcggcaggctgccgatagccgccgttctcggcggtgttggccgttctacttcatgtatgcagtgcctacaaactattgccggtcgcgtgcgcggctcgaatcgtgccggcggagctggcggcggccgcgaacaacacattttgccacattatctagatctagacctgagggtcgatactggcagcggcaggctgccgatagccgccgttctcggcggtgttggccgttctacttcatgtatgcagtgcctacaaactaatgccggtcgcgtgcgcggctcgaatcgtgccggcggagctggcggcggccgcgaacaacacattttgccacattatctagatctagacctgagggtcgatactggcagcggcaggctgccgatagccgccgttctcggcggtgttggccgttctacttcatgtatgcagtgcctacaaactaatgccggtcgcgtgcgcggctcgaatcgtgccggcggagctggcggcggccgcgaacaacacattttgccacattatctagatctagacctgagggtcgatactggcagcggcaggctgccgatagccgccgttctcggcggtgttggccgttctacttcatgtatgcagtgcgtacaaactaatgccggtcgcgtgcgcggctcgaatcgtgccggcggagctggcggcggccgcgaacaacacattttgccacattatctagatctagacctgagggtcgatactggcagcggcaggctgccgatagccgccgttctcggcggtgttggccattctacttcatgtatgcagtgcctacaaacaattgccggtcgcgtgcgcggctcgaatcgtgccggcacagctggcggcggccgcgaacaacacattttgccacattatctagatctagacctgagggtcgatactggcagcggcaggctgccgatagccgccgttctcggcggtgttggccgttctacttcatgtatgcagtgcctacaaactaatgccggtcgcgtgcgcggctcgaatcgtgccggcggagctggcggcggccgcgaacaacacattttgccacattatctagatctagacctgagggtcgatactggcagcggcaggctgccgatagccgccgttctcggcggtgttggccgttctacttcatgtatgcagtgcctacaaactaatgccggtcgcgtgcgcggctcgaatcgtgccggcggagctggcggtggccgcgaacaacacattttgccacattttcaaaatctagacctgagggtcgatactggcagcggcaggctgccgatagccgccgttctcggcggtgttggccactctactttacgtatgcagtgcctacaaactaatgccggtcgcgtgcgcggctcgaagcgtgccggcggagctggcggcggccgcgaacaacacattttgccacattatctagatctagacctgagggtcgatactggcagcggcaggctgccgatagccgccgttctcggcggtgttggccattctactttacgtatgcagtgcctacaaactaatgccggtcgcgtgcgcggctcgaagcgtgccggcggagctggcggcggccgcgaacaacacattttgccacattttcaaaatctagacctgagggtcgatactggcagcggcaggctgccgatagccgccgttctcggcggtgttggccgttctacttcatgtatgcagtgcctacaaactaatgccggtcgcgtgcgcggctcgaatcgtgccggcggagctggcggtggccgcgaacaacacattttgccacattatctagatctagacctgagggtcgatactggcagcggcaggctgccgatagccgccgttctcggcggtgttggccgatctacttcatgtatgcagtgcctacaaactaatgccggtcgcgtgcgcggctcgaatcgtgccggcggagctggcggcggccgcgaacaacacattttgccacattatctagatctagacctgagggtcgatactggcagcggcaggctgccgatagccgccgttctcggcggtgttggccgttctacttcatgtatgcagtgcctacaaacaattgccggtcgcgtgcgcggctcgaatcgtgccggcggagctggcggcggccgcgaacaacacattttgccacattatctagatctagacctgagggtcgatactggcagcggcaggctgccgatagccgccgttctcggcggtgttggccgttctacttcatgtatgcagtgcgtacaaactaatgccggtcgcgtgcgcgtctcgaatcgtgccggcggagctggcggcggccgcgaacaacacattttgccacattatctagatctagacctgagggtcgatactggcagcggcaggctgccgatagccgccgttctcggcggtgttggccgttctactttacgtatgcagtgcctataaactaatgccgatcgcgtgcgcggctcgaagcgtgccgtcggagctggcggcggccgcgaacaacacattttgccacattatctagatctagacctgagggtcgatactggcagcggcaggctgccgatagccgccgttctcggcggtgttggccgttctacttcatgtatgcagtgcctacaaacaattgccggtcgcgtgcgcgtctcgaatcgtgccggcggagctggcggcggccgcgaacaacacattttgccacattatctagatctagacctgagggtcgatactggcagcggcaggctgccgatagccgccgttctcggcggtgttggccgttctacttcatgtatgcagtgcctacaaactaatgccggtcgcgtgcgcggctcgaatcgtgccggcggagctgacggcggccgcgaacaacacattttgccacattatctagatctagacctgagggtcgatactagcagcggcaggctgccgacagccgccgttctcggcggtgttggccgttctacttcatgtatgcagtgcctacaaacaattgccggtcgcgtgcgcggctcgaatcgtgccggcggagctggcggcggccgcgaacaacacattttgccacattatctagatctagacctgagggtcgatactggcagcggcaggctgccgatagccgccgttctcggcggtgttggccgttctacttcatgtatgcagtgcctacaaactaatgccggtcgcgtgcgcggctcgaatcgtgccggcggagctggcggcggccgcgaacaacacattttgccacattatctagatctagacctgagggtcgatactggcagcggcaggctgccgatagccgccgttctcggcggtgttggccgttcaacttcatgtatgcagtgcctacaaactaatgccggtcgcgtgcgcggctcgaatcgtgccggcggagctggcggcggccgcgaacaacacattttgccacattatctagatctagacctgagggtcgatactggcagcggcaggctgccgatagccgccgttctcggcggtgttggccgttctacttcatgtatgcagtgcctacaaacaattgccggtcgcgtgcgcggctcgaatcgtgccggcggagctggcggcggccgcgaacaacacattttgccacattatctagatctagacctgagggtcgatactggcagcggcaggctgccgatagccgccgttctcggcggtgttggccgttctacttcatgtatgcagtgcctacaaactaatgccggtcgcgtgcgcggctcgaatcgtgccggcggagctggcggcggccgcgaacaacacattttgccacattatctagatctagacctgagggtcgatactggcagcggcaggctgccgatagccgccgttctcggcggtgttggccgttctacttcatgtatgcagtgcctacaaacaattgccggtcgcgtgcgcggctcgaatcgtgccggcggagctggcggcggccgcgaacaacacattttgccacattatctagatctagacctgagggtcgatactggcagcggcaggctgccgacagccgccgttctcggcggtgttggccgttctacttcatgtatgcagtgcctacaaacaattgccggtcgcgtgcgcggctcgaatcgtgccggcggagctggcggcggccgcgaacaacacattttgccacattatctagatctagacctgagggtcgatactggcagcggcaggctgccgatagccgccgttctcggcggtgttggccgttctacttcatgtatgcagtgcctacaaactaatgccggtcgcgtgcgcgtctcgaatcgtgccggcggagctggcggcggccgcgaacaacacatttgccacattatctagatctagacctgagggtcgatactggcagcggcaggctgccgatagccgccgttctcggcggtgttggccgttctacttcatgtatgcagtgcctacaaactaatgccggtcgcgtgcgcggctcgaatcgtgccggcggagctggcggcggccgcgaacaacacattttgccacattttcaaaatctagacctgagggtcgatactggcagcggcaggctgccgatagccgccgttctcggcggtgttggccgttctacttcatgtatgcagtgcctacaaactaatgccggtcgcgtgcgcggctcgaatcgtgccggcggagctggcggcggccgcgaacaacacattttgccacattttcaaaatctagacctgagggtcgatactggcagcggcaggctgccgatagccgccgttctcggcggtgttggccgttctacttcatgtatgcagtgcgtacaaactaatgccggtcgcgtgcgcgtctcgaatcgtgccggcggagctgacggcggccgcgaacaacacattttgccacattatctagatctagacctgagggtcgatactagcagcggcaggctgccgatagccgccgttctcggcggtgttggccgttctacttcatgtatgcagtgcctacaaacaattgccggtcgcgtgcgcggctcgaatcgtgccggcggagctggcggcggccgcgaacaacacattttgccacattatctagatctagacctgagggtcgatactggcagcggcaggctgccgatagccgccgttctcggcggtgttggccgttcaacttcatgtatgcagtgcctacaaactaatgccggtcgcgtgcgcggctcgaatcgtgccggcggagctggcggcggccgcgaacaacacattttgccacattatctagatctagacctgagggtcgatactggcagcggcaggctgccgatagccgccgttctcggcggtgttggccgttctacttcatgtatgcagtgcctacaaactaatgccggtcgcgtgcgcggctcgaagcgtgccggcggagctggcggcggccgcgaacaacacattttgccacattatctagatctagacctgagggtcgatactggcagctgcaggctgccgatagccaccgttctcggcggtgttggccgttctacttcatgtatgcagtgcctacaaactaatgccggtcgcgtgcgcggctcgaagcgtgccggcggagctggcggcggccgcgaacaacacattttgccacattatctagatctagacctgagggtcgatactggcagcggcaggctgccgatagccgccgttctcggcggtgttggccgttctacttcatgtatgcagtgcctacaaactaatgccggtcgcgtgcgcggctcgaatcgtgccggcggagctggcggcggccgcgaacaacacattttgccacattatctagatctagacctgagggtcgatactggcagcggcaggctgccgatagccgccgttctcggcggtgttggccgttctactttacgtatgcagtgcctacaaactattgccggtcgcgtgcgcggctcgaatcgtgccggcggagctggcggcggccgcgaacaacacattttgccacattatctagatctagacctgagggtcgatactggcagcggcaggctgccgatagccgccgttctcggcggtgttggccgttctactttacgtatgcagtgcctacaaacaattgccggtcgcgtgcgcggctcgaatcgtgccggcggagctggcggcggccgcgaacaacacattttgccacattatctagatctagacctgagggtcgatactagcagcggcaggctgccgatacccgccgttctcggcggtgttggccgttctacttcatgtatgcagtgcctacaaacaattgccggtcgcgtgcgcggctcgaatcgtgccggcggagctggcggcggccgcgaacaacacattttgccacattatctagatctagacctgagggtcgatactggcagcggcaggctgccgatagccgccgttctcggcggtgttggccattctacttcatgtatgcagtgcctacaaactattgccggtcgcgtgcgcggctcgaatcgtgccggcggagctggcggcggccgcgaacaacacattttgccacattatctagatctagacctgagggtcgatactggcagcggcaggctgccgatagccgccgttctcggcggtgttggccattctactttacgtatgcagtgcctacaaactaatgccggtcgcgtgcgcggctcgaatcgtgccggcggagctggcggcggccgcgaacaacacattttgccacattttcaaaatctagacctgagggtcgatactggcagcggcaggctgccgatagccgccgttctcggcggtgttggccgttctacttcacgtatgcagtgcgtacaaactaatgccggtcgcgtgcgcggctcgaatcgtgccggcggagctggcggcggccgcgaacaacacattttgccacattttcaaaatctagacctgagggtcgatactggcagcggcaggctgccgatagccgccgttctcggcggtgttggccgttcaacttcatgtatgcagtgcctacaaactaatgccggtcgcgtgcgcggctcgaatcgtgccggcggagctggcggcggccgcgaacaacacattttgccacattatctagatctagacctgagggtcgatactggcagcggcaggctgccgatagccgccgttctcggcggtgttggccgttctacttcatgtatgcagtgcctacaaacaattgccggtcgcgtgcgcgtctcgaatcgtgccggcggagctggcggcggccgcgaacaacacattttgccacattatctagatctagacctgagggtcgatactagcagcggcaggctgccgatagccgccgttctcggcggtgttggccgttctactttacgtatgcagtgcctacaaacaattgccggtcgcgtgcgcgtctcgaatcgtgccggcggagctggcggcggccgcgaacaacacattttgccacattatctagatctagacctgagggtcgatactagcagcggcaggctgccgatagccgccgttctcggcggtgttggccgttctacttcacgtatgcagtgcctacaaacaattgccggtcgcgtgcgcggctcgaatcgtgccggcggagctggcggcggccgcgaacaacacattttgccacattatctagatctagacctgagggtcgatactggcagcggcaggctgccgatagccgccgttctcggcggtgttggccgttcaacttcatgtatgcagtgcctacaaactaatgccggtcgcgtgcgcggctcgaatcgtgccggcggagctggcggcggccgcgaacaacacattttgccacattatctagatctagacctgagggtcgatactggcagcggcaggctgccgatagccgccgttctcggcggtgttggccgttctacttcatgtatgcagtgcctacaaactaatgccggtcgcgtgcgcggctcgaatcgtgccggcggagctggcggcggccgcgaacaacacattttgccacattatctagatctagacctgagggtcgatactggcagcggcaggctgccgatagccgccgttctcggcggtgttggccgttctacttcatgtatgcagtgcctacaaactaatgccggtcgcgtgcgcggctcgaatcgtgccggcggagctggcggcggccgcgaacaacacattttgccacattatctagatctagacctgagggtcgatactggcagcggcaggctgccgatagccgccgttctcggcggtgttggccattctactttacgtatgcagtgcctacaaactaatgccggtcgcgtgcgcggctcgaagcgtgccggcggagctggcggtggccgcgaacaacacattttgccacattttcaaaatctagacctgagggtcgatactggcagcggcaggctgccgatagccgccgttctcggcggtgttggccattctactttacgtatgcagtgcctacaaactaatgccggtcgcgtgcgcggctcgaatcgtgccggcggagctggcggcggccgcgaacaacacattttgccacattatctagatctagacctgagggtcgatactggcagcggcaggctgccgatagccgccgttctcggcggtgttggccgttcaacttcatgtatgcagtgcctacaaactaatgccggtcgcgtgcgcggctcgaatcgtgccggcggagctggcggcggccgcgaacaacacattttgccacattttcaaaatctagacctgagggtcgatactagcagcggcaggctgccgacagccgccgttgtcggcggtgttggccgttctacttcatgtatgcagtgcctacaaactaatgccggtcgcgtgcgcggctcgaatcgtgccggcggagctggcggcggccgcgaacaacacattttgccacattttcaaaatctagacctgagggtcgatactagcagcggcaggctgccgacagccgccgttctcggcggtgttggccgttctacttcatgtatgcagtgcctacaaactaatgccggtcgcgtgcgcggctcgaatcgtgccggcggagctggcggcggccgcgaacaacacattttgccacattatctagatctagacctgagggtcgatactggcagcggcaggctgccgatagccgccgttctcggcggtgttggccgttctacttcatgtatgcagtgcctacaaactaatgccggtcgcgtgcgcggctcgaatcgtgccggcggagctggcggcggccgcgaacaacacattttgccacattatctagatctagacctgagggtcgatactggcagcggcaggctgccgatagccgccgttctcggcggtgttggccattctacttcatgtatgcagtgcctacaaactaatgccggtcgcgtgcgcggctcgaatcgtgccggcggagctggcggcggccgcgaacaacacattttgccacattatctagatctagacctgagggtcgatactggcagcggcaggctgccgatagccgccgttctcggcggtgttggccgttctacttcatgtatgcagtgcctacaaactaatgccggtcgcgtgcgcggctcgaatcgtgccggcggagctggcggcggccgcgaacaacacattttgccacattatctagatctagacctgagggtcgatactggcagcggcaggctgccgatagccgccgttctcggcggtgttggccgttctactttatgtatgcagtgcctacaaactaatgccggtcgcgtgcgcggctcgaagcgtgccggcggagctggcggcggccgcgaacaacacattttgccacattttcaaaatctagacctgagggtcgatactggcagcggcaggctgccgatagccgccgttctcggcggtgttggccgttctacttcatgtatgcagtgcctacaaactaatgccggtcgcgtgcgcggctcgaatcgtgccggcggagctggcggcggccgcgaacaacacattttgccacattatctagatctagacctgagggtcgatactggcagcggcaggctgccgatagccgccgttctcggcggtgttggccattctacttcatgtatgcagtgcctacaaactaatgccggtcgcgtgcgcggctcgaatcgtgccggcggagctggcggcggccgcgaacaacacattttgccacattatcaaaatctagacctgagggtcgatactggcagcggcaggctgccgatagccgccgttctcggcggtgttggccgttctacttcatgtatgcagtgcctacaaacaattgccggtcgcgtgcgcggctcgaatcgtgccggcggagctggcggcggccgcgaacaacacattttgccacattatctagatctagacctgagggtcgatactagcagcggcaggctgccgatagccgccgttctcggcggtgttggccgttctacttcatgtatgcagtgcctacaaacaattgccggtcgcgtgcgcggctcgaatcgtgccggcggagctggcggcggccgcgaacaacacattttgccacattatctagatctagacctgagggtcgatactagcagcggcaggctgccgatagccgccgttctcggcggtgttggccgttctacttcatgtatgcagtgcctacaaactaatgccggtcgcgtgcgcggctcgaatcgtgccggcggagctggcggcggccgcgaacaacacattttgccacattatctagatctagacctgagggtcgatactggcagcggcaggctgccgatagccgccgttctcggcggtgttggccgttctacttcatgtatgcagtgcctacaaacaattgccggtcgcgtgcgcgtctcgaatcgtgccggcggagctggcggcggccgcgaacaacacattttgccacattatctagatctagacctgagggtcgatactagcagcggcaggctgccgatagccgccgttctcggcggtgttggccgttctactttacgtatgcagtgcctacaaacaattgccggtcgcgtgcgcgtctcgaatcgtgccggcggagctggcggcggccgcgaacaacacattttgccacattatctagatctagacctgagggtcgatactagcagcggcaggctgccgatagccgccgttctcggcggtgttggccgttctactttacgtatgcagtgcctacaaacaattgccggtcgcgtgcgcggctcgaatcgtgccggcggagctggcggcggccgcgaacaacacattttgccacattatctagatctagacctgagggtcgatactagcagcggcaggctgccgatagccgccgttctcggcggtgttggccgttctactttacgtatgcagtgcctacaaacaattgccggtcgcgtgcgcggctcgaatcgtgccggcggagctggcggcggccgcgaacaacacattttgccacattatctagatctagacctgagggtcgatactggcagcggcaggctgccgatagccgccgttctcggcggtgttggccgttctacttcatgtatgcagtgcctacaaacaattgccggtcgcgtgcgcggctcgaatcgtgccggcggagctggcggcggccgcgaacaacacattttgccacattatctagatctagacctgagggtcgatactggcagcggcaggctgccgatagccgccgttctcggcggtgttggccgttctacttcatgtatgcagtgcctacaaactaatgccggtcgcgtgcgcggctcgaatcgtgccggcggagctggcggcggccgcgaacaacacattttgccacattatctagatctagacctgagggtcgatactggcagcggcaggctgccgatagccgccgttctcggcggtgttggccgttctacttcatgtatgcagtgcctacaaacaattgccggtcgcgtgcgcggctcgaatcgtgccggcggagctggcggcggccgcgaacaacacattttgccacattatctagatctagacctgagggtcgatactggcagcggcaggctgccgatagccgccgttctcggcggtgttggccgttctacttcatgtatgcagtgcctacaaacaattgccggtcgcgtgcgcggctcgaatcgtgctgtcggagctggcggcggccgcgaacaacacattttgccacattatctagatctagacctgagggtcgatactggcagcggcaggctgccgatagccgccgttctcggcggtgttggccgttcaacttcatgtatgcagtgcctacaaacaattgccggtcgcgtgcgcggctcgaatcgtgccggcggagctggcggcggccgcgaacaacacattttgccacattttcaaaatctagacctgagggtcgatactggcagcggcaggctgccgatagccgccgttctcggcggtgttggccgttctacttcatgtatgcagtgcctacaaacaattgccggtcgcgtgcgcgtctcgaatcgtgccggcggagctggcggcggccgcgaacaacacattttgccacattatctagatctagacctgagggtcgatactagcagcggcaggctgccgatagccgccgttctcggcggtgttggccgttctactttacgtatgcagtgcctacaaacaattgccggtcgcgtgcgcgtctcgaatcgtgccggcggagctggcggcggccgcgaacaacacattttgccacattatctagatctagacctgagggtcgatactagcagcggcaggctgccgatagccgccgttctcggcggtgttggccgttctactttacgtatgcagtgcctacaaacaattgccggtcgcgtgcgcggctcgaatcgtgccggcggagctggcggcggccgcgaacaacacattttgccacattatctagatctagacctgagggtcgatactggcagcggcaggctgccgatagccgccgttctcggcggtgttggccgttctacttcatgtatgcagtgcctacaaacaattgccggtcgcgtgcgcggctcgaatcgtgccgtcggagctggcggcggccgcgaacaacacattttgccacattatctagatctagacctgagggtcgatactggcagcggcaggctgccgatagccgcccttctcggcggtgttggccgttctactttacgtatgcagtgcctacaaattaatgccggtcgcgtgcgcggctcgaatcgtgccggcggagctggcggcggccgcgaacaacacattttgccacattttcaaaatctagacctgagggtcgatactggcagcggcaggctgccgatagccgccgttctcggcggtgttggccgttctacttcatgtatgcagtgcctacaaactaatgccggttgcgtgcgcggctcgaagcgtgccggcggagctggcggcggccgcgaacaacacattttgccacattatctagatctagacctgagggtcgatactggcagcggcaggctgccgatagccgccgttctcggcggtgttggccgatctacttcatgtatgcagtgcctacaaactaatgccggtcgcgtgcgcggctcgaagcgtgccggcggagctggcggcggccgcgaacaacacattttgccacattatctagatctagacctgagggtcgatactggcagctgcaggctgccgatagccaccgttctcggcggtgttggccgttctacttcatgtatgcagtgcctacaaactaatgccggtcgcgtgcgcggctcgaagcgtgccggcggagctggcggcggccgcgaacaacacattttgccacattatctagatctagacctgagggtcgatactggcagcggcaggctgccgatagccgccgttctcggcggtgttggccgttctacttcatgtatgcagtgcctacaaactaatgccggtcgcgtgcgcggctcgaatcgtgccggcggagctggcggcggccgcgaacaacacattttgccacattatctagatctagacctgagggtcgatactggcagcggcaggctgccgatagccgccgttctcggcggtgttggccgttctacttcatgtatgcagtgcctacaaactaatgccggtcgcgtgcgcggctcgaatcgtgccggcggagctggcggtggccgcgaacaacacattttgccacattttcaaaatctagacctgagggtcgatactggcagcggcaggctgccgatagccgccgttctcggcggtgttggccactctactttacgtatgcagtgcctacaaactaatgccggtcgcgtgcgcggctcgaagcgtgccggcggagctggcggcggccgcgaacaacacattttgccacattatctagatctagacctgagggtcgatactggcagcggcaggctgccgatagccgccgttctcggcggtgttggccattctactttacgtatgcagtgcctacaaactaatgccggtcgcgtgcgcggctcgaagcgtgccggcggagctggcggcggccgcgaacaacacattttgccacattttcaaaatctagacctgagggtcgatactggcagcggcaggctgccgatagccgccgttctcggcggtgttggccgttctacttcatgtatgcagtgcctacaaactaatgccggtcgcgtgcgcggctcgaatcgtgccggcggagctggcggtggccgcgaacaacacattttgccacattatctagatctagacctgagggtcgatactggcagcggcaggctgccgatagccgccgttctcggcggtgttggccattctactttacgtatgcagtgcctacaaactaatgccggtcgcgtgcgcggctcgaagcgtgccggcggagctggcggcggccgcgaacaacacattttgccacattttcaaaatctagacctgagggtcgatactggcagcggcaggctgccgatagccgccgttctcggcggtgttggccattctactttacgtatgcagtgcctacaaactaatgccggccgcgtgcgcggctcgaagcgtgccggcggagctggcggcggccgcgaacaacacattttgccacattatctagatctagacctgagggtcgatactggcagcggcaggctgccgatagccgccgttctcggcggtgttggccgttctacttcatgtatgcagtgcctacaaactaatgccggtcgcgtgcgcggctcgaagcgtgccggcggagctggcggcggccgcgaacaacacattttgccacattatctagatctagacctgagggtcgatactagcagcggcaggctgccgatagccgccgttctcggcggtgttggccgttcaacttcatgtatgcagtgcctacaaacaattgccggtcgcgtgcgcggctcgaatcgtgccggcggagctggcggcggccgcgaacaacacattttgccacattatctagatctagacctgagggtcgatactggcagcggcaggctgccgatagccgccgttctcggcggtgttggccgttctacttcatgtatgcagtgcctacaaactaatgccggtcgcgtgcgcggctcgaatcgtgccggcggagctggcggcggccgcgaacaacacattttgccacattatctagatctagacctgagggtcgatactagcagcggcaggctgccgatagccgccgttctcggcggtgttggccgttctacttcatgtatgcagtgcctacaaacaattgccggtcgcgtgcgcggctcgaatcgtgccggcggagctggcggcggccgcgaacaacacattttgccacattatctagatctagacctgagggtcgatactggcagcggcaggctgccgatagccgccgttctcggcggtgttggccgttctacttcatgtatgcagtgcctacaaactaatgccggtcgcgtgcgcggctcgaatcgtgccggcggagctgacggcggccgcgaacaacacattttgccacattatctagatctagacctgagggtcgatactagcagcggcaggctgccgacagccgccgttctcggcggtgttggccgttctacttcatgtatgcagtgcctacaaacaattgccggtcgcgtgcgcggctcgaatcgtgccggcggagctggcggcggccgcgaacaacacattttgccacattatctagatctagacctgagggtcgatactggcagcggcaggctgccgatagccgccgttctcggcggtgttggccgttctacttcatgtatgcagtgcctacaaacaattgccggtcgcgtgcgcggctcgaatcgtgccggcggagctggcggcggccgcgaacaacacattttgccacattatctagatctagacctgagggtcgatactagcagcggcaggctgccgatagccgccgttctcggcggtgttggccgttctacttcatgtatgcagtgcctacaaacaattgccggtcgcgtgcgcggctcgaatcgtgccggcggagctggcggcggccgcgaacaacacattttgccacattatctagatctagacctgagggtcgatactagcagcggcaggctgccgatagccgccgttctcggcggtgttggccgttctacttcatgtatgcagtgcctacaaactaatgccggtcgcgtgcgcggctcgaatcgtgccggcggagctggcggcggccgcgaacaacacattttgccacattatctagatctagacctgagggtcgatactggcagcggcaggctgccgatagccgccgttctcggcggtgttggccgttctacttcatgtatgcagtgcctacaaactaatgccggtcgcgtgcgcggctcgaatcgtgccggcggagctggcggcggccgcgaacaacacattttgccacattatctagatctagacctgagggtcgatactagcagcggcaggctgccgatagccgccgttctcggcggtgttggccgttctacttcatgtatgcagtgcctacaaacaattgccggtcgcgtgcgcggctcgaatcgtgccggcggagctggcggcggccgcgaacaacacattttgccacattatctagatctagacctgagggtcgatactagcagcggcaggctgccgatagccgccgttctcggcggtgttggccgttctacttcatgtatgcagtgcctacaaactaatgccggtcgcgtgcgcggctcgaatcgtgccggcggagctggcggcggccgcgaacaacacattttgccacattatctagatctagacctgagggtcgatactggcagcggcaggctgccgatagccgccgttctcggcggtgttggccgttctacttcatttatgcagtgcctacaaactaatgccggccgcgtgcgcggctcgaagcgtgccgtcggagctggcggcggccgnnnnnnnnnnnnnnnnnnnnnnnnnnnnnnnnnnnnnnnnnnnnnnnnnnnnnnnnnnnnnnnnnnnnnnnnnnnnnnnnnnnnnnnnnnnnnnnnnnnnnnnnnnnnnnnnnnnnnnnnnnnnnnnnnnnnnnnnnnnnnnnnnnnnnnnnnnnnnnnnnnnnnnnnnnnnnnnnnnnnnnnnnnnnnnnnnnnnnnnnnnnnnnnnnnnnnnnnnnnnnnnnnnnnnnnnnnnnnnnnnnnnnnnnnnnnnnnnnnnnnnnnnnnnnnnnnnnnnnnnnnnnnnnnnnnnnnnnnnnnnnnnnnnnnnnnnnnnnnnnnnnnnnnnnnnnnnnnnnnnnnnnnnnnnnnnnnnnnnnnnnnnnnnnnnnnngccacattatctagatctagacctgagggtcgatactggcagcggcaggctgccgatagccgccgttctcggcggtgttggccgatctacttcatgtatgcagtgcctacaaactaatgccggtcgcgtgcgcggctcgaagcgcgccggtggagctggcggcggccgcgaacaacacattttgccacattatctagatctagacctgagggtcgatactggcagcggcaggctgccgatagccgccgttctcggcggtgttggccgttctacttcatgtatgcagtgcctacaaactattgccggtcgcgtgcgcggctcgaatcgtgccgtcggagctggcggcggccgcgaacaacacattttgccacattatctagatctagacctgagggtcgatactggcagcggcaggctgccgatagccgccgttctcggcggtgttggccgttctacttcatgtatgcagtgcctacaaactaatgccggtcgcgtgcgcggctcgaagcgtgccggcggagctggcggcggccgcgaacaacacattttgccacattatctagatctagacctgagggtcgatactggcagcggcaggctgccgatagccgccgttctcggcggtgttggccgttctacttcatgtatgcagtgcctacaaactattgccggtcgcgtgcgcggctcgaatcgtgccgtcggagctggcggcggccgcgaacaacacattttgccacattttcaaaatctagacctgagggtcgatactggcagcggcaggctgccgatagccgccgttctcggcggtgttggccgatctacttcatgtatgcagtgcctacaaactaatgccggtcgcgtgcgcggctcgaagcgtgccggcggagctggcggcggccgcgaacaacacattttgccacattatctagatctagacctgagggtcgatactggcagcggcaggctgccgatagccgccgttctcggcggtgttggccgttctacttcatgtatgcagtgcctacaaactaatgccggtcgcgtgcgcggctcgaagcgtgccgtcggagctggcggcggccgcgaacaacacattttgccacattttcaaaatctagacctgagggtcgatactggcagcggcaggctgccgatagccgccgttctcggcggtgttggccgatctacttcatgtatgcagtgcctacaaactaatgccggtcgcgtgcgcggctcgaagcgtgccggcggagctggcggcggccgcgaacaacacattttgccacattttcaaaatctagacctgagggtcgatactggcagcggcaggctgccgatagccgccgttctcggcggtgttggccgttctacttcatgtatgcagtgcctacaaactaatgccggtcgcgtgcgcggctcgaagcgtgccgtcggagctggcggcggccgcgaacaacacattttgccacattttcaaaatctagacctgagggtcgatactggcagcggcaggctgccgatagccgccgttctcggcggtgttggccgatctacttcatgtatgcagtgcctacaaactaatgccggtcgcgtgcgcggctcgaagcgtgccggcggagctggcggcggccgcgaacaacacattttgccacattttcaaaatctagacctgagggtcgatactggcagcggcaggctgccgatagccgccgttctcggcggtgttggccgttctacttcatgtatgcagtgcctacaaactaatgccggtcgcgtgcgcggctcgaagcgtgccggcggagctggcggcggccgcgaacaacacattttgccacattttcaaaatctagacctgagggtcgatactggcagcggcaggctgccgatagccgccgttctcggcggtgttggccgatctacttcatgtatgcagtgcctacaaactaatgccggtcgcgtgcgcggctcgaagcgtgccggcggagctggcggcggccgcgaacaacacattttgccacattatctagatctagacctgagggtcgatactggcagcggcaggctgccgatagccgccgttctcggcggtgttggccgttcaacttcatgtatgcagtgcctacaaactaatgccggtcgcgtgcgcggctcgaatcgtgccggcggagctggcggcggccgcgaacaacacattttgccacattttcaaaatctagacctgagggtcgatactggcagcggcaggctgccgatagccgccgttctcggcggtgttggccgttcaacttcatgtatgcagtgcctacaaactaatgccggtcgcgtgcgcggctcgaatcgtgccggcggagctggcggcggccgcgaacaacacattttgccacattatctagatctagacctgagggtcgatactggcagcggcaggctgccgatagccgccgttctcggcggtgttggccgttctacttcatgtatgcagtgcctacaaactaatgccggtcgcgtgcgcggctcgaatcgtgccggcggagctggcggcggccgcgaacaacacattttgccacattatctagatctagacctgagggtcgatactggcagcggcaggctgccgatagccgccgttctcggcggtgttggccgatctacttcatgtatgcagtgcctacaaactaatgccggtcgcgtgcgcggctcgaatcgtgccggcggagctggcggcggccgcgaacaacacattttgccacattatctagatctagacctgagggtcgatactggcagcggcaggctgccgatagccaccgttctcggcggtgttggccgttctacttcatgtatgcagtgcctacaaactaatgccggtcgcgtgcgcggctcgaagcgtgccggcggagctggcggcggcggcgaacaacacattttgccacattatctagatctagacctgagggtcgatactggcagcggcaggctgccgatagccgccgttctcggcggtgttggccgttctacttcatgtatgcagtgcctacaaactaatgccggtcgcgtgcgcggctcgaatcgtgccggcggagctggcggcggccgcgaacaacacattttgccacattatctagatctagacctgagggtcgatactggcagcggcaggctgccgatagccgccgttctcggcggtgttggccattctactttacgtatgcagtgcctacaaactaatgccggtcgcgtgcgcggctcgaagcgtgccggcggagctggcggtggccgcgaacaacacattttgccacattttcaaaatctagacctgagggtcgatactggcagcggcaggctgccgatagccgccgttctcggcggtgttggccattctactttacgtatgcagtgcctacaaactaatgccggtcgcgtgcgcggctcgaagcgtgccggcggagctggcggcggccgcgaacaacacattttgccacattatctagatctagacctgagggtcgatactggcagcggcaggctgccgatagccgccgttctcggcggtgttggccattctacttcatgtatgcagtgcctacaaactaatgccggtcgcgtgcgcggctcgaagcgtgccggcggagctggcggcggccgcgaacaacacattttgccacattatctagatctagacctgagggtcgatactggcagcggcaggctgccgatagccgccgttctcggcggtgttggccgttctacttcatgtatgcagtgcctacaaactaatgccggtcgcgtgcgcggctcgaatcgtgccggcggagctggcgggggccgcgaacaacacatttgccacannnnnnnnnnnnnnnnnnnnnnnnnnnnnnnnnnnnnnnnnnnnnnnnnnnnnnnnnnnnnnnnnnnnnnnnnnnnnnnnnnnnnnnnnnnnnnnnnnnnnnnnnnnnnnnnnnnnnnnnnnnnnnnnnnnnnnnnnnnnnnnnnnnnnnnnnnnnnnnnnnnnnnnnnnnnnnnnnnnnnnnnnnnnnnnnnnnnnnnnnnnnnnnnnnnnnnnnnnnnnnnnnnnnnnnnnnnnnnnnnnnnnnnnnnnnnnnnnnnnnnnnnnnnnnnnnnnnnnnnnnnnnnnnnnnnnnnnnnnnnnnnnnnnnnnnnnnnnnnnnnnnnnnnnnnnnnnnnnnnnnnnnnnnnnnnnnnnnnnnnnnnnnnnnnnnnnnnnnnnnnnnnnnnnnnnnnnnnnnnnnnnnnnnnnnnnnnnnnnnnnnnnnnnnnnnnnnnnnnnnnnnnnnnnnnnnnnnnnnnnnnnnnnnnnnnnnnnnnnnnnnnnnnnnnnnnnnnnnnnnnnnnnnnnnnnnnnnnnnnnnnnnnnnnnnnnnnnnnnnnnnnnnnnnnnnnnnnnnnnnnnnnnnnnnnnnnnnnnnnnnnnnnnnnnnnnnnnnnnnnnnnnnnnnnnnnnnnnnnnnnnnnnnnnnnnnnnnnnnnnnnnnnnnnnnnnnnnnnnnnnnnnnnnnnnnnnnnnnnnnnnnnnnnnnnnnnnnnnnnnnnnnnnnnnnnnnnnnnnnnnnnnnnnnnnnnnnnnnnnnnnnnnnnnnnnnnnnnnnnnnnnnnnnnnnnnnnnnnnnnnnnnnnnnnnnnnnnnnnnnnnnnnnnnnnnnnnnnnnnnnnnnnnnnnnnnnnnnnnnnnnnnnnnnnnnnnnnnnnnnnnnnnnnnnnnnnnnnnnnnnnnnnnnnnnnnnnnnnnnnnnnnnnnnnnnnnnnnnnnnnnnnnnnnnnnnnnnnnnnnnnnnnnnnnnnnnnnnnnnnnnnnnnnnnnnnnnnnnnnnnnnnnnnnnnnnnnnnnnnnnnnnnnnnnnnnnnnnnnnnnnnnnnnnnnnnnnnnnnnnnnnnnnnnnnnnnnnnnnnnnnnnnnnnnnnnnnnnnnnnnnnnnnnnnnnnnnnnnnnnnnnnnnnnnnnnnnnnnnnnnnnnnnnnnnnnnnnnnnnnnnnnnnnnnnnnnnnnnnnnnnnnnnnnnnnnnnnnnnnnnnnnnnnnnnnnnnnnnnnnnnnnnnnnnnnnnnnnnnnnnnnnnnnnnnnnnnnnnnnnnnnnnnnnnnnnnnnnnnnnnnnnnnnnnnnnnnnnnnnnnnnnnnnnnnnnnnnnnnnnnnnnnnnnnnnnnnnnnnnnnnnnnnnnnnnnnnnnnnnnnnnnnnnnnnnnnnnnnnnnnnnnnnnnnnnnnnnnnnnnnnnnnnnnnnnnnnnnnnnnnnnnnnnnnnnnnnnnnnnnnnnnnnnnnnnnnnnnnnnnnnnnnnnnnnnnnnnnnnnnnnnnnnnnnnnnnnnnnnnnnnnnnnnnnnnnnnnnnnnnnnnnnnnnnnnnnnnnnnnnnnnnnnnnnnnnnnnnnnnnnnnnnnnnnnnnnnnnnnnnnnnnnnnnnnnnnnnnnnnnnnnnnnnnnnnnnnnnnnnnnnnnnnnnnnnnnnnnnnnnnnnnnnnnnnnnnnnnnnnnnnnnnnnnnnnnnnnnnnnnnnnnnnnnnnnnnnnnnnnnnnnnnnnnnnnnnnnnnnnnnnnnnnnnnnnnnnnnnnnnnnnnnnnnnnnnnnnnnnnnnnnnnnnnnnnnnnnnnnnnnnnnnnnnnnnnnnnnnnnnnnnnnnnnnnnnnnnnnnnnnnnnnnnnnnnnnnnnnnnnnnnnnnnnnnnnnnnnnnnnnnnnnnnnnnnnnnnnnnnnnnnnnnnnnnnnnnnnnnnnnnnnnnnnnnnnnnnnnnnnnnnnnnnnnnnnnnnnnnnnnnnnnnnnnnnnnnnnnnnnnnnnnnnnnnnnnnnnnnnnnnnnnnnnnnnnnnnnnnnnnnnnnnnnnnnnnnnnnnnnnnnnnnnnnnnnnnnnnnnnnnnnnnnnnnnnnnnnnnnnnnnnnnnnnnnnnnnnnnnnnnnnnnnnnnnnnnnnnnnnnnnnnnnnnnnnnnnnnnnnnnnnnnnnnnnnnnnnnnnnnnnnnnnnnnnnnnnnnnnnnnnnnnnnnnnnnnnnnnnnnnnnnnnnnnnnnnnnnnnnnnnnnnnnnnnnnnnnnnnnnnnnnnnnnnnnnnnnnnnnnnnnnnnnnnnnnnnnnnnnnnnnnnnnnnnnnnnnnnnnnnnnnnnnnnnnnnnnnnnnnnnnnnnnnnnnnnnnnnnnnnnnnnnnnnnnnnnnnnnnnnnnnnnnnnnnnnnnnnnnnnnnnnnnnnnnnnnnnnnnnnnnnnnnnnnnnnnnnnnnnnnnnnnnnnnnnnnnnnnnnnnnnnnnnnnnnnnnnnnnnnnnnnnnnnnnnnnnnnnnnnnnnnnnnnnnnnnnnnnnnnnnnnnnnnnnnnnnnnnnnnnnnnnnnnnnnnnnnnnnnnnnnnnnnnnnnnnnnnnnnnnnnnnnnnnnnnnnnnnnnnnnnnnnnnnnnnnnnnnnnnnnnnnnnnnnnnnnnnnnnnnnnnnnnnnnnnnnnnnnnnnnnnnnnnnnnnnnnnnnnnnnnnnnnnnnnnnnnnnnnnnnnnnnnnnnnnnnnnnnnnnnnnnnnnnnnnnnnnnnnnnnnnnnnnnnnnnnnnnnnnnnnnnnnnnnnnnnnnnnnnnnnnnnnnnnnnnnnnnnnnnnnnnnnnnnnnnnnnnnnnnnnnnnnnnnnnnnnnnnnnnnnnnnnnnnnnnnnnnnnnnnnnnnnnnnnnnnnnnnnnnnnnnnnnnnnnnnnnnnnnnnnnnnnnnnnnnnnnnnnnnnnnnnnnnnnnnnnnnnnnnnnnnnnnnnnnnnnnnnnnnnnnnnnnnnnnnnnnnnnnnnnnnnnnnnnnnnnnnnnnnnnnnnnnnnnnnnnnnnnnnnnnnnnnnnnnnnnnnnnnnnnnnnnnnnnnnnnnnnnnnnnnnnnnnnnnnnnnnnnnnnnnnnnnnnnnnnnnnnnnnnnnnnnnnnnnnnnnnnnnnnnnnnnnnnnnnnnnnnnnnnnnnnnnnnnnnnnnnnnnnnnnnnnnnnnnnnnnnnnnnnnnnnnnnnnnnnnnnnnnnnnnnnnnnnnnnnnnnnnnnnnnnnnnnnnnnnnnnnnnnnnnnnnnnnnnnnnnnnnnnnnnnnnnnnnnnnnnnnnnnnnnnnnnnnnnnnnnnnnnnnnnnnnnnnnnnnnnnnnnnnnnnnnnnnnnnnnnnnnnnnnnnnnnnnnnnnnnnnnnnnnnnnnnnnnnnnnnnnnnnnnnnnnnnnnnnnnnnnnnnnnnnnnnnnnnnnnnnnnnnnnnnnnnnnnnnnnnnnnnnnnnnnnnnnnnnnnnnnnnnnnnnnnnnnnnnnnnnnnnnnnnnnnnnnnnnnnnnnnnnnnnnnnnnnnnnnnnnnnnnnnnnnnnnnnnnnnnnnnnnnnnnnnnnnnnnnnnnnnnnnnnnnnnnnnnnnnnnnnnnnnnnnnnnnnnnnnnnnnnnnnnnnnnnnnnnnnnnnnnnnnnnnnnnnnnnnnnnnnnnnnnnnnnnnnnnnnnnnnnnnnnnnnnnnnnnnnnnnnnnnnnnnnnnnnnnnnnnnnnnnnnnnnnnnnnnnnnnnnnnnnnnnnnnnnnnnnnnnnnnnnnnnnnnnnnnnnnnnnnnnnnnnnnnnnnnnnnnnnnnnnnnnnnnnnnnnnnnnnnnnnnnnnnnnnnnnnnnnnnnnnnnnnnnnnnnnnnnnnnnnnnnnnnnnnnnnnnnnnnnnnnnnnnnnnnnnnnnnnnnnnnnnnnnnnnnnnnnnnnnnnnnnnnnnnnnnnnnnnnnnnnnnnnnnnnnnnnnnnnnnnnnnnnnnnnnnnnnnnnnnnnnnnnnnnnnnnnnnnnnnnnnnnnnnnnnnnnnnnnnnnnnnnnnnnnnnnnnnnnnnnnnnnnnnnnnnnnnnnnnnnnnnnnnnnnnnnnnnnnnnnnnnnnnnnnnnnnnnnnnnnnnnnnnnnnnnnnnnnnnnnnnnnnnnnnnnnnnnnnnnnnnnnnnnnnnnnnnnnnnnnnnnnnnnnnnnnnnnnnnnnnnnnnnnnnnnnnnnnnnnnnnnnnnnnnnnnnnnnnnnnnnnnnnnnnnnnnnnnnnnnnnnnnnnnnnnnnnnnnnnnnnnnnnnnnnnnnnnnnnnnnnnnnnnnnnnnnnnnnnnnnnnnnnnnnnnnnnnnnnnnnnnnnnnnnnnnnnnnnnnnnnnnnnnnnnnnnnnnnnnnnnnnnnnnnnnnnnnnnnnnnnnnnnnnnnnnnnnnnnnnnnnnnnnnnnnnnnnnnnnnnnnnnnnnnnnnnnnnnnnnnnnnnnnnnnnnnnnnnnnnnnnnnnnnnnnnnnnnnnnnnnnnnnnnnnnnnnnnnnnnnnnnnnnnnnnnnnnnnnnnnnnnnnnnnnnnnnnnnnnnnnnnnnnnnnnnnnnnnnnnnnnnnnnnnnnnnnnnnnnnnnnnnnnnnnnnnnnnnnnnnnnnnnnnnnnnnnnnnnnnnnnnnnnnnnnnnnnnnnnnnnnnnnnnnnnnnnnnnnnnnnnnnnnnnnnnnnnnnnnnnnnnnnnnnnnnnnnnnnnnnnnnnnnnnnnnnnnnnnnnnnnnnnnnnnnnnnnnnnnnnnnnnnnnnnnnnnnnnnnnnnnnnnnnnnnnnnnnnnnnnnnnnnnnnnnnnnnnnnnnnnnnnnnnnnnnnnnnnnnnnnnnnnnnnnnnnnnnnnnnnnnnnnnnnnnnnnnnnnnnnnnnnnnnnnnnnnnnnnnnnnnnnnnnnnnnnnnnnnnnnnnnnnnnnnnnnnnnnnnnnnnnnnnnnnnnnnnnnnnnnnnnnnnnnnnnnnnnnnnnnnnnnnnnnnnnnnnnnnnnnnnnnnnnnnnnnnnnnnnnnnnnnnnnnnnnnnnnnnnnnnnnnnnnnnnnnnnnnnnnnnnnnnnnnnnnnnnnnnnnnnnnnnnnnnnnnnnnnnnnnnnnnnnnnnnnnnnnnnnnnnnnnnnnnnnnnnnnnnnnnnnnnnnnnnnnnnnnnnnnnnnnnnnnnnnnnnnnnnnnnnnnnnnnnnnnnnnnnnnnnnnnnnnnnnnnnnnnnnnnnnnnnnnnnnnnnnnnnnnnnnnnnnnnnnnnnnnnnnnnnnnnnnnnnnnnnnnnnnnnnnnnnnnnnnnnnnnnnnnnnnnnnnnnnnnnnnnnnnnnnnnnnnnnnnnnnnnnnnnnnnnnnnnnnnnnnnnnnnnnnnnnnnnnnnnnnnnnnnnnnnnnnnnnnnnnnnnnnnnnnnnnnnnnnnnnnnnnnnnnnnnnnnnnnnnnnnnnnnnnnnnnnnnnnnnnnnnnnnnnnnnnnnnnnnnnnnnnnnnnnnnnnnnnnnnnnnnnnnnnnnnnnnnnnnnnnnnnnnnnnnnnnnnnnnnnnnnnnnnnnnnnnnnnnnnnnnnnnnnnnnnnnnnnnnnnnnnnnnnnnnnnnnnnnnnnnnnnnnnnnnnnnnnnnnnnnnnnnnnnnnnnnnnnnnnnnnnnnnnnnnnnnnnnnnnnnnnnnnnnnnnnnnnnnnnnnnnnnnnnnnnnnnnnnnnnnnnnnnnnnnnnnnnnnnnnnnnnnnnnnnnnnnnnnnnnnnnnnnnnnnnnnnnnnnnnnnnnnnnnnnnnnnnnnnnnnnnnnnnnnnnnnnnnnnnnnnnnnnnnnnnnnnnnnnnnnnnnnnnnnnnnnnnnnnnnnnnnnnnnnnnnnnnnnnnnnnnnnnnnnnnnnnnnnnnnnnnnnnnnnnnnnnnnnnnnnnnnnnnnnnnnnnnnnnnnnnnnnnnnnnnnnnnnnnnnnnnnnnnnnnnnnnnnnnnnnnnnnnnnnnnnnnnnnnnnnnnnnnnnnnnnnnnnnnnnnnnnnnnnnnnnnnnnnnnnnnnnnnnnnnnnnnnnnnnnnnnnnnnnnnnnnnnnnnnnnnnnnnnnnnnnnnnnnnnnnnnnnnnnnnnnnnnnnnnnnnnnnnnnnnnnnnnnnnnnnnnnnnnnnnnnnnnnnnnnnnnnnnnnnnnnnnnnnnnnnnnnnnnnnnnnnnnnnnnnnnnnnnnnnnnnnnnnnnnnnnnnnnnnnnnnnnnnnnnnnnnnnnnnnnnnnnnnnnnnnnnnnnnnnnnnnnnnnnnnnnnnnnnnnnnnnnnnnnnnnnnnnnnnnnnnnnnnnnnnnnnnnnnnnnnnnnnnnnnnnnnnnnnnnnnnnnnnnnnnnnnnnnnnnnnnnnnnnnnnnnnnnnnnnnnnnnnnnnnnnnnnnnnnnnnnnnnnnnnnnnnnnnnnnnnnnnnnnnnnnnnnnnnnnnnnnnnnnnnnnnnnnnnnnnnnnnnnnnnnnnnnnnnnnnnnnnnnnnnnnnnnnnnnnnnnnnnnnnnnnnnnnnnnnnnnnnnnnnnnnnnnnnnnnnnnnnnnnnnnnnnnnnnnnnnnnnnnnnnnnnnnnnnnnnnnnnnnnnnnnnnnnnnnnnnnnnnnnnnnnnnnnnnnnnnnnnnnnnnnnnnnnnnnnnnnnnnnnnnnnnnnnnnnnnnnnnnnnnnnnnnnnnnnnnnnnnnnnnnnnnnnnnnnnnnnnnnnnnnnnnnnnnnnnnnnnnnnnnnnnnnnnnnnnnnnnnnnnnnnnnnnnnnnnnnnnnnnnnnnnnnnnnnnnnnnnnnnnnnnnnnnnnnnnnnnnnnnnnnnnnnnnnnnnnnnnnnnnnnnnnnnnnnnnnnnnnnnnnnnnnnnnnnnnnnnnnnnnnnnnnnnnnnnnnnnnnnnnnnnnnnnnnnnnnnnnnnnnnnnnnnnnnnnnnnnnnnnnnnnnnnnnnnnnnnnnnnnnnnnnnnnnnnnnnnnnnnnnnnnnnnnnnnnnnnnnnnnnnnnnnnnnnnnnnnnnnnnnnnnnnnnnnnnnnnnnnnnnnnnnnnnnnnnnnnnnnnnnnnnnnnnnnnnnnnnnnnnnnnnnnnnnnnnnnnnnnnnnnnnnnnnnnnnnnnnnnnnnnnnnnnnnnnnnnnnnnnnnnnnnnnnnnnnnnnnnnnnnnnnnnnnnnnnnnnnnnnnnnnnnnnnnnnnnnnnnnnnnnnnnnnnnnnnnnnnnnnnnnnnnnnnnnnnnnnnnnnnnnnnnnnnnnnnnnnnnnnnnnnnnnnnnnnnnnnnnnnnnnnnnnnnnnnnnnnnnnnnnnnnnnnnnnnnnnnnnnnnnnnnnnnnnnnnnnnnnnnnnnnnnnnnnnnnnnnnnnnnnnnnnnnnnnnnnnnnnnnnnnnnnnnnnnnnnnnnnnnnnnnnnnnnnnnnnnnnnnnnnnnnnnnnnnnnnnnnnnnnnnnnnnnnnnnnnnnnnnnnnnnnnnnnnnnnnnnnnnnnnnnnnnnnnnnnnnnnnnnnnnnnnnnnnnnnnnnnnnnnnnnnnnnnnnnnnnnnnnnnnnnnnnnnnnnnnnnnnnnnnnnnnnnnnnnnnnnnnnnnnnnnnnnnnnnnnnnnnnnnnnnnnnnnnnnnnnnnnnnnnnnnnnnnnnnnnnnnnnnnnnnnnnnnnnnnnnnnnnnnnnnnnnnnnnnnnnnnnnnnnnnnnnnnnnnnnnnnnnnnnnnnnnnnnnnnnnnnnnnnnnnnnnnnnnnnnnnnnnnnnnnnnnnnnnnnnnnnnnnnnnnnnnnnnnnnnnnnnnnnnnnnnnnnnnnnnnnnnnnnnnnnnnnnnnnnnnnnnnnnnnnnnnnnnnnnnnnnnnnnnnnnnnnnnnnnnnnnnnnnnnnnnnnnnnnnnnnnnnnnnnnnnnnnnnnnnnnnnnnnnnnnnnnnnnnnnnnnnnnnnnnnnnnnnnnnnnnnnnnnnnnnnnnnnnnnnnnnnnnnnnnnnnnnnnnnnnnnnnnnnnnnnnnnnnnnnnnnnnnnnnnnnnnnnnnnnnnnnnnnnnnnnnnnnnnnnnnnnnnnnnnnnnnnnnnnnnnnnnnnnnnnnnnnnnnnnnnnnnnnnnnnnnnnnnnnnnnnnnnnnnnnnnnnnnnnnnnnnnnnnnnnnnnnnnnnnnnnnnnnnnnnnnnnnnnnnnnnnnnnnnnnnnnnnnnnnnnnnnnnnnnnnnnnnnnnnnnnnnnnnnnnnnnnnnnnnnnnnnnnnnnnnnnnnnnnnnnnnnnnnnnnnnnnnnnnnnnnnnnnnnnnnnnnnnnnnnnnnnnnnnnnnnnnnnnnnnnnnnnnnnnnnnnnnnnnnnnnnnnnnnnnnnnnnnnnnnnnnnnnnnnnnnnnnnnnnnnnnnnnnnnnnnnnnnnnnnnnnnnnnnnnnnnnnnnnnnnnnnnnnnnnnnnnnnnnnnnnnnnnnnnnnnnnnnnnnnnnnnnnnnnnnnnnnnnnnnnnnnnnnnnnnnnnnnnnnnnnnnnnnnnnnnnnnnnnnnnnnnnnnnnnnnnnnnnnnnnnnnnnnnnnnnnnnnnnnnnnnnnnnnnnnnnnnnnnnnnnnnnnnnnnnnnnnnnnnnnnnnnnnnnnnnnnnnnnnnnnnnnnnnnnnnnnnnnnnnnnnnnnnnnnnnnnnnnnnnnnnnnnnnnnnnnnnnnnnnnnnnnnnnnnnnnnnnnnnnnnnnnnnnnnnnnnnnnnnnnnnnnnnnnnnnnnnnnnnnnnnnnnnnnnnnnnnnnnnnnnnnnnnnnnnnnnnnnnnnnnnnnnnnnnnnnnnnnnnnnnnnnnnnnnnnnnnnnnnnnnnnnnnnnnnnnnnnnnnnnnnnnnnnnnnnnnnnnnnnnnnnnnnnnnnnnnnnnnnnnnnnnnnnnnnnnnnnnnnnnnnnnnnnnnnnnnnnnnnnnnnnnnnnnnnnnnnnnnnnnnnnnnnnnnnnnnnnnnnnnnnnnnnnnnnnnnnnnnnnnnnnnnnnnnnnnnnnnnnnnnnnnnnnnnnnnnnnnnnnnnnnnnnnnnnnnnnnnnnnnnnnnnnnnnnnnnnnnnnnnnnnnnnnnnnnnnnnnnnnnnnnnnnnnnnnnnnnnnnnnnnnnnnnnnnnnnnnnnnnnnnnnnnnnnnnnnnnnnnnnnnnnnnnnnnnnnnnnnnnnnnnnnnnnnnnnnnnnnnnnnnnnnnnnnnnnnnnnnnnnnnnnnnnnnnnnnnnnnnnnnnnnnnnnnnnnnnnnnnnnnnnnnnnnnnnnnnnnnnnnnnnnnnnnnnnnnnnnnnnnnnnnnnnnnnnnnnnnnnnnnnnnnnnnnnnnnnnnnnnnnnnnnnnnnnnnnnnnnnnnnnnnnnnnnnnnnnnnnnnnnnnnnnnnnnnnnnnnnnnnnnnnnnnnnnnnnnnnnnnnnnnnnnnnnnnnnnnnnnnnnnnnnnnnnnnnnnnnnnnnnnnnnnnnnnnnnnnnnnnnnnnnnnnnnnnnnnnnnnnnnnnnnnnnnnnnnnnnnnnnnnnnnnnnnnnnnnnnnnnnnnnnnnnnnnnnnnnnnnnnnnnnnnnnnnnnnnnnnnnnnnnnnnnnnnnnnnnnnnnnnnnnnnnnnnnnnnnnnnnnnnnnnnnnnnnnnnnnnnnnnnnnnnnnnnnnnnnnnnnnnnnnnnnnnnnnnnnnnnnnnnnnnnnnnnnnnnnnnnnnnnnnnnnnnnnnnnnnnnnnnnnnnnnnnnnnnnnnnnnnnnnnnnnnnnnnnnnnnnnnnnnnnnnnnnnnnnnnnnnnnnnnnnnnnnnnnnnnnnnnnnnnnnnnnnnnnnnnnnnnnnnnnnnnnnnnnnnnnnnnnnnnnnnnnnnnnnnnnnnnnnnnnnnnnnnnnnnnnnnnnnnnnnnnnnnnnnnnnnnnnnnnnnnnnnnnnnnnnnnnnnnnnnnnnnnnnnnnnnnnnnnnnnnnnnnnnnnnnnnnnnnnnnnnnnnnnnnnnnnnnnnnnnnnnnnnnnnnnnnnnnnnnnnnnnnnnnnnnnnnnnnnnnnnnnnnnnnnnnnnnnnnnnnnnnnnnnnnnnnnnnnnnnnnnnnnnnnnnnnnnnnnnnnnnnnnnnnnnnnnnnnnnnnnnnnnnnnnnnnnnnnnnnnnnnnnnnnnnnnnnnnnnnnnnnnnnnnnnnnnnnnnnnnnnnnggcctagtgcaaagccgtggactgtcgtcgggcttgaaaacgtggctcacttcatctctcgaaaaatgggttttccaccgctgcgcttgtacaaaacacctaattattcaggagttcgacgcattggtggcggcaacctgtgcgggggagactcgcagctcgctgtaacttagcgctgggaactcgacacgataactgcacttcaatatcaacaacttgttggaacaatacatgtacacgtcgacgcgcgataattacgtgaccacgatattggtgatcaccctttcaggaaccatggtgtgctgctgggctgcgaagggggaggatcgccaccgctgccatgctgcaaggaagcaccaacgactacacgtgaacttgacgaaccctctagctgtctgtgagcggcggtgagccctcgtttaatgtgcttcaggaagggctctccatcgtgagcatccgagtttcttgggcgcttgctaggctttcgtggcccgccgaggccgccccgggtaccaacgtccatacacaaatccaatgaggcagctgactcgattaggcctaaccctatgctggtcttttcgaccagtcgttgctcctaactgagctaaaaagcgtatggtttttaaccaatcaaaggcgttttggttcgtctctgagcgtcgcggctgtcgcccagtgagtcgctcagtgagcgatgccttcttttctcatgtgctccaactgcagagatctcgagcgcaacctgctagaagagcgccaccaccgccagacggctgagtatgctcgtgatgccgagctgcagatgcgcgagcgagcggacgatactatcaaagagctacgcaaggcgatcaaggagcagcgcaagaacctcgacgagcagcgcgagacgatcatggagcagcgcattaccttcggcaagcagctcgagacgatcaagcaactgcatgagacgaacaaagagctgcgcgatgccatgaaaaaagagatcgaggccaacgaagaccaccgcaagacgattgagcaccaacaagaccttatcgacaaagggatcaagtccaatgagatccagcaacgcatgattcaggacctgcaacgcgaattgccggctcttcggcaccagcttagacagcagcaagtacagaaccatagtgatatggacaatctgcgtctcgagtttagagcacaacgagaaaaggatcgtgcattggtcgagtccaatcttcgggcattgaagcgaattcacaacgagaccgcgcgatgccgaccagaactgaagctactcgcggtctcttcaaatcgacggacagccttgacgataaacgagggatccttcgaaggaaaaatgctagaacgcgttcgtgcgttcaatgaaaacagacgcgctgatgcgagagctgaagaagatacgcgcgtgaagacggagatcacattccaccactcgaaggagaaaaatttgaagaggacgatctcacgcggcgagcgcacgcgcgaaatatcggtgaaagcgtcggacacggtcgtcgtccccggtgtggtggacgaagctcgtctaaaaatcgacagcgcgctcgatgcagcggggctggtcagtacatctgttcgtcaagatattttcattgaactaattatcttctttgcctaggacagcgtgacgaagtcgcgattcgatatctccggcgcggcatcaagtacgacaagcacgaaggcgttgacgaaatcgtgtttgatagcctcgacgaagtcgtcgccagtcacagagcgtcgtcgagtgacaagtactgcaaagcgtcgacgtacttgctcttgaatgacgtgctggtgacccctgtgtggcagttcgaagtggtataaccaatcaaagttcacttctcgtgagagcaaaaacatgagatgctcgcgatgcagcagtagtagagcactggtacacacctcacctcgggcacctccttggtgtccgggatcaactgcaacctcctgtctcttgcaggagcaatctgacccctgctaagttcagaagaagtgtcggcatccatatattcagcacaataaggaaatactagcacatgtagtactttggaccaacctcgtgctcaaccagcacctccatttgcttatgaggtctgtccagatactaagcttaacgggagaatcagggtgggcttctcaacggtcaagtctagcacgacgctagcttcgtcctcgcgcagtagcagctgggtggcattcatcagcgcgtgactcaccatcgcgccaagtacgccttcaagcacaaagtccaccagctccaagacatgttgatggtagtacaccacggatcggctcgaatgccaggcgcagagaggtctggtcgctcgtctttgggtagctcacaaacgcgaacgtcagctgcgcctctggttccatcccggaggcaacgcgacgtcgagtttcctcctcgtccagacccagcaacggcgaatacagcggatgcttcaacgtgctcaagtccgtgcccacgaagtcccccacatgaccagtaacctcgaacgtgtcctcgtcagcagaaattttgccttccacatcgtagctcgtgtaattgacaccggcattgctgatgtcgagacgcgcaagctggcgatgaagctggtccttgttaaacgtcagactgaattgtaccagcgacgcgagtattataacgagcggctttcctctagagcgcagactggttaacgcagcagcctccatctcatggtcaccaccgggggggtgactcctttgtagattccttctctgctggcaaacttcgcggcggtgtggcatcttcagacgggagatcatagtcatgagactgaattgcagatgcgtacgcgggtatgatgcggtagaacagcgccacagacgacggggtccattgcagatgcagcacgttcaactgcacgtctgcctccagttgcgatgcctggccactttcttgtactctcggtactccattatcctgagaaaacgccgtgacgtcgatagcgatcaggtgtggagtctcgcctgcgtcgtcttcaccggtagaaatgagtttgtagtagcgagactcgggcgaatacagtttatcttccatcacaagggccttcaatcgtgcgtggaagtcctggagggctgagtacgcttccatcgagaaggacgtttgcgaggcccgcaggataaatgcgtccttagcagccgactcccgcaagttgagctccacacatccaagcgacagctccatctccagcaggaatttcttctcggatgttattaacgggaacgacagtggcattgcttgtaccttcatcaatcgtgctttcggaatccgtcgcactctcttcgtcgccactctcatgatcttgatcctcgaagtagaacaggagcctaccgttatcccgggcaatggtcgcggcttgtgcaactatggacgaatggatctggcccagcgccacaagctgctcctccactaggcatatcgagatcttgggaacggcagcgtagatgcccagttgcggcagcggccttgcctccacgtctttccgtccagtacgtgaagaaagtcgtgagctagctgcgtgtgaagtgaaaactcaatcgacagctccttcacaatcttgttgacgccgcggagttcttcgtcagaccagtccaccaactgctcctgccgtccgagcaacacgtgaatctgggtcacgtctagccgccaatgcagtcgacggggatcttctcctgtcgtttccagccgtgtcgatagccgtaacctttatcaaccgtcatccggacaggctccctgcggacgcggaccttcagcgtggcttccacgctgccgttgggtctgtagcaccgcccgacgactcacgtcgatactgacgcagcacgtacccgggccttcccacggcgatagcgacgatgccgggctacagaacgaatggaaccgaaaatcgtgtgcgagcccgttaaagaggtcgaagtgctgcacttggaagctcgcgtcccctcgttttctggctgaatgttcacagccagcgagccattgaacattacagtcacgaacaaactctcgtgtgcgttggattgaaacagccatttgtcagctgaaactgcacggacaccgggttgcaccccatcggcacttcgtgtgcgttgctagccttctccacagcgttattataagcctcgcgtagattttcccagccctcgacggacaatacgtgctcctccgctgcttcacttgacgcgggagcagattcactttcgccgacgacgaaatacgagtaccacgagccacctccgccttgagtcgcctgtgttttagcgtgttctttggccgaagcttccacttcctccttcgcacgcttctcggcggcttcggcaacgtcgcgtaacagcagcaccacatccagcgggtagatttcttcatatcgctgcttgaacttgccctgcctcgtcgaggggtccaatggtgaatcgttgcgcagctccgtcctgaaagcctcgacgtacaatttttgctccagcagcgccttctgtactgacgaccagcgcatttggcggtgnnnnnnnnnnnnnnnnnnnnnnnnnnnnnnnnnnnnnnnnnnnnnnnnnnnnnnnnnnnnnnnnnnnnnnnnnnnnnnnnnnnnnnnnnnnnnnnnnnnnnnnnnnnnnnnnnnnnnnnnnnnnnnnnnnnnnnnnnnnnnnnnnnnnnnnnnnnnnnnnnnnnnnnnnnnnnnnnnnnnnnnnnnnnnnnnnnnnnnnnntacccgggccttcccacggcgatagcgacgatgccgggctacagaacgaatggaaccgaaaatcgtgtgcgagcccgttaaagaggtcgaagtgctgcacttggaagctcgcgtcccctcgttttctggctgaatgttcacagccagcgagccattgaacattacagtcacgaacaaactctcgtgtgcgttggattgaaacagccatttgtcagctgaaactgcaatcggcacttcgtgtgcgttgctagccttctccacagcgttattgtaagcctcgcgtagattttcccagccctcggcagacaatacgtgctcctccgctgcttcacttgacgcgggagcagattcactttcgccgacgacgaaatacgagtaccacgagccacctccgccatgagtcgcctgtgttttagcgtgttctttggccgaagcttccacttcctccttcgcacgcttctcggcggcttcggcaacgtcgcgtaacagcagcaccacatccagcgggtagatttcttcatatcgctgcttgaacttgccctgcctcgtcgaggggtccaatggtgaatcgttgcgcagctccgtcctgaaagcctcgacgtacaatttttgctccagcagcgccttctgtactgacgaccagcgcatttggcggtgatgtgggcgtgggggatcagatgcacgtcccgcagcgtcacctgcaggttggccacgatgcgggccgtgagtctcgagacgaaggtgccctcgtcctcctcgggcttctgctgctcgtgctgctcctgacccgggccaacgcgcgcggcgaagcggcggtgctggcgcagcagctccagctgattcttctcggccgcgctgcacggctccgtgttgggcaccacgagcgccaacacgccctcgagagtgatggccatgctggcgctgcccaactggttccagggcaggcgcaccagcacgcggcccacgctgccgctggtcacggctacgggctcggccagcgaatgcggctttagtgacaggtcgcgcagctccagctcgccactccacagccccacgaccagcgagtcgctgcgcaggccggccacatacttgcccagctgcgcctccaggatcgacgagatgatggccttggccatggctgcgggcggcatcgatagcggcggcaagggccgctgtggcccgacaggatccgcgtaatcagattgtagccatgttccgtgaaaataaatagtggtttaacatcagcacgtcgtacgagaccttgactagagcggtctgctcggccgtgaagcgaggcaaacgctcaccgactcgctcgcgcatgacgggcgggtagtcgccggaggtgaggggcagcagctaccagccaaactcgaagttcatcgcgcgctccgcagcttctgcatcttcaatgttgttctcccgaagagggtggaactgattgacattgagtacgatacccatgcgctttaggctggacaaaaccactcgattgagctccctgaaccgttgcacggagtacgcgtgtgacaggagcacattgtgcgccacctcgtagaccagcgtgggcgagtcgcggaatcctggcgggtgcagacccgtgttgtagccgtacacgacgaaggaagtggctcgttgaaggtggtccagaagtcgaccttgtcaccgaattcgttgtacagctgcgtcgagtactccacgaagtggtcgatgatctccgggttgagccatccctgaggggtgagcttgttgtgcagcttcgtgggcaggtcccagtggtaaatggtaaaaatcggagagatgccgctctcaaccaacctgtcaagcaacgcgtggtagtagacgagaccgggggcgtgggcgcatgcgtcgcgcttccgggtcccagttcattatgcgcgaccacgagacggagaagcggaaggactggagtcccgtctcccccatgagcttgatgtcgtccgcatagcggtggtagaagtcgtcgacgttggcgcactcgaagccaggatgttcacgacaaaagtcgtcccaaatgctcggagtgcggccgtcctcgttccacgcgccctccacctggtacgacgcggtggccgacccgaagaggaaatcagcagggaagcagcgaggctcggcggccgctgcaggggaagagagcagggtgacggtcgccgccgccgcgagtccgagacggtgcagcagccacatcacttgagctgtgagttcgaggcggcaacttcacgaatgaggcaggagcggattcgcaagatctcgacgaaagcgttggcgctactgtagggctgtttcgcgcagtgctcgaaagtgcacgaaagtacttcggcgccattgctgccacgagcacttaccggtactgtgtgcttgtggcacatgatatgtcgaacaacatactaccttacccgggcgacaagcgtcccgggggaggtcgcagttcgtaagtgtaaggttctggttgtgcttgttgtgttgcgagtaaaatggaaactgaattgatgtctttgtctgtttgctgctatccatctacccgagggcgccctcatggcgctcggtcctaaacatgaagtggttggctgaggcgtgccggagcaggagcttgcgcaaccggtgagtatgcagacgacgacttgggctctctgcgtgcggactcaactgatgatgtggttgtgttctgctcttgcacgtgcagatcattacacgccccccgacttgagcgagtcgcggcaccttgaacgttgaagtcgccgaagttgaagttggtagtaccgtagaccccgatgtaaggaacactaccgtcgaaacgctgttcaagagaattccactaggcccgtgccactcgattgcgttggcgaagatcttttagcagcgcttcccagtggctgacgtgtttgatgtcgcgctcgcgttcccacgtgttctcatggtgagggagcccgtgccacttgaccaagtactcaggttggcggttgaagatgcgcttcttgatcagagcttcgacaacgtgtagtggctcgtcatcgtcgtcgaaaatcacgggagtcgacttcgggatcactcggccgacgaagcgatcagggttgctgttgtataccttgagcttgtcgatgttgaagcgtgggctgatgtgattcaagttggccggtagatccagcagcgcgacgttgccgtgaagttccaggatcgggtacggaccgatgaagcgcgggatgaacttccgtgagcgaagcgtcgtttccgcggtggcgtgcgagatgttcaggtcctacgtcgacagcaaggctagatcactgaccttgaatgggtttgctgcacgacgccggtcgtagaacttcttttgagcctcttgcgcatccaacagattcttccgagcacgttcgatcacctcttgacgatgctgaacaaatcgagacgcgtactccacacgagaccttgccaccggctgatcgctctccacactacccaatgggttcttagggtgacgaccggtgtcgacgaagaagggcgacagcttcgacgagctggacaccagtgttgcgtgtgcatactcaatcatgggcaggtgctcattccagtcgttgccatggtacgaaacagagcatcgcaacgtgtcctcgagagtccgattctgacgctcagtttggccatcggcctgcgctcggtgggcagtcgtcatcgctgtcttgatcttcatcaactgtaccagtgctttccagaacttcgacgtgaacttcgggtcccggtcggagatgatggtcgatgggataccatagcaccggatgacgttgttgaagaacagcttggcaatgtcttccgcagtcgccgtggtgtgcgttgggatgtagactggacgctttgacagcttgtccaccacgaccatgatcgcatcaaagccgtcggatacaggcaaatgcgtgatgaagtcagtcgagacaacatcctaacacgcagcgggcaacgggatcggctgaagctttcctgctcttcgtccggtgcttgacttgtacctcatgcatgactcacaactctgaacgtaggctttgatgtccagatccatgctcggccagaagtaccactgtgccgcagcaagctgagtgcgacggatgcctgggtgcgccatgatcgccgtatcatgcgcgttgtgaatgacatcgagccgaagtttccggttgtttggcacacagaggcggcgtaggctgtcgttgctcttcaaatagatcaacccgcgaatgacttcgtactcttccgacgagcgtctggacttccacagtggcttgaagactggatctctgccgtatgccttctgaaacgcccgcttcgtttggttatccagctgaagtgagctgatcaccgtgctgtcctccattgacgctgcgttcaacctcatgcgccactgtgctgtgccaactccgagtgcctttgtggctggctgtttgacggccagcatcacagcttgatcccgggacggtatgctttggagcttcgccgtagccatggtacgtcgtgagaccacgtctcgaatgttcgtgcatggggtagacgtcaaacacgccgtacacactacaaccggcccgggcttggactcacaatcctcctgctcctcccccggcctcgatgaagcatcaggggggcgcgacaacgcgtccgaaacgacattcaaagctcctggatgatgatgcagagtgaactggaaggacgcaaagaagtcgagccagcgggccaggcgacccgacaggcgtggatgctgcaaaaaccacttgcacgccgaattgtccgtgtacacttcaaacgagactccatggaggtaatgacgccaacgtgtaagcgcctgcttgatcgcaaagagctccttctcgtgaacaggccagttcagctcgtgaggtcccagcttcttgctgaagaaagccacggggagatcgttgccatcatgcatctgagagagcactccaccaatgcacgcatgactggcatccgttgtcacgatgaatgttttttcaaagtccggcagacgaagcaccggagcgtgctggagcgcgagcttaatggcattgaaagcttggcgctggtgttcgttccatacccaagcgacatccttcttggccagagagctcaggggcagtaccaacgtcgcaaactggtggatgaagcgacgatagtacccggcgaggcccaagaagcgttggaggtccttgatgttgcatggctcggtccactctgcgatggctcgagtcttgcgagcgtccacgtgcaacccatcagcagagatggtgtggccaaggaagtccaccgaggcttgtccgaagtcgcacttgtcaggacgggcgtaaagcttgttagcgcgcaggacttcgcagacttgtcgtaagtgttcaacgtggtcagccatcgatcgcgagaagatgcagatgtcgtcaaggtaaacgaccacgagcagtagatgactcagcagcttgcgcatcaggcgtgtccacgtgcctggcatgccggccagacccatgggcgccaggttccaatgatatatctcatggttcgtcctgaatgccgtgtactgttttgacgtcggagacatgcgcatttggtggtatccactcgcgaggtcgagaatagagaagaccactgcgcccaccatgcgatcaaagagttgttcgatgtgcggtagcgggatcttagccacatccgaggcggcattcaccaagcgatagtcgatgactcatcgaatcggcatgtgcgggttgttcgagtgcaaccactccaagcgggatgggaacttgcccgtcgcgggatcctttttcggcacgccgaagatgttcgatacccagggagagtcagacacttcgacccagttcttcttcagcagctctgccacaaagatgtccaatacttcctgctcaaccttcgagaggcggaagggagctcggttgcttggcgtcacccctggtttcaagaccacttcgtgctcgatggagcggcttggtggtaatccaggtggcagctctgctggaaagacatctgcgaactcttcaagaaccgcttgaagctgcaatggcacggacttcaccttgagcgacgtcttcaccgtgacatgatacagttcgacgtactcgtcagccttcaccttcttctcggactccgcagccgcaagaacacacagcggcgacgcgcctgtaccatcgtcaccgtcgtcaaagatgcgtggtaaggtctggtgtcccagcgctgctagtgagctcggtcccaacggcatactgaagtagcctgcctgcatatggtcatcgagctgctgccgcaggttcgggggaagcgggtgctgaagaaattccggtttcacttccactgaagccaccgtcggtcccgccacctcaagactgctgttcacggaaccgaagtcatgtactacacgctggttggggaagggcatcactccggtttgccaattgatgatcgggttgaactgcactaaccacaggtgaccgagaatcacgtcttggtttgaagatacctcacatcaatgagagaaacatcgttgaagactctgccatcaaagcagacagtctccaaacattgctgtgcggtacgcgccggggttgtcgtgccatcaaagcgctcggccgtggccttggtggtgctgcgcgagacccggacgcacaatgttgcgctctgcaccactgtcgatcaagactcgcactgcctggccgctcatcgctccctcgaacctcaacagttcacgattgggcgacaacttcgcgtcgagagacaccatgttcagctgcaaactgtcgatgacctcgacgtggtcgtcgcggttgtctgcgtaggcgtcgtcatcgtcgtcgtcttcaacaatgcggcgaaacgagccctcgtttgcgcggaaagaaccgcgcccttgtggaggacgagacgagcctcgggggttgttacgcgctggccgcttaggacacgtagccaggcggtgtccgggctccttgcagtaaaagcaaagattacttcgcagacactcttcgtgagagacgaagcgcgaactcccgatctccattggggtcggctcctcgacgtgatgtgacgactgctgaaggcgttgtggcccttggccaccgcggttcacgttggttcgacgcgatcctacagcgtgcgtgcggtcgtacatgagtgcaaacgaatttgcgtctgtcgtgttcctgaactggcgcagcttcacctcttgtttgatctctacgaccaaccccttctggaaatgcatgaccttgtcgatgtcgctcatctcctctaccttgcagatgatgtgccggaaggccgatacgtaatcttcaagacaggtgaagttgttctggcgcaggcgtaggagctggtcacgcaggtgctcttgccgatcgggtgtcgtgaactcgctggtcagcagctcctcgaactgcgtgaccgagtgcaggaagtttccgtcgtgggagacgaactcgcggtaccaagccgctgctggtcccttcaagtttgccaccaagagcgacaagtggcgctgctgcggcgagtcggcgccgtacttgatgttcttcgactcaaagtagagcttggcgctgaagaggtagtccgcgacgtcgtcgtccttggtgccggagaacatcggcatggtgatgccctcggcccggtactcgcgcgtgtctggcgacgaagagtcggccaccgacggttgctgctgctgcgaggtggattgctgctgctgttgctgttgcagtgtcgccgccatctggcgctggagctcggctgtctgtgccatgaactgctgctgctcgggcatcatcgccgcgagcgaggcgaacatctgctgcacgctgtcagcgtgctgcatcgctgcttcatccatgtttgcgcctacgctagacacgtcgtcaatagatggctggggcgcgcaagctcctcagccaaatcaatcaaagtttgaagtcgcaggcactcccaggagcgctgcttccgacaatgtctgtaagccccaacgaagtcacagaagctcgtcctggagctctgtttccaacaagtaccaaccacttgctccagcgtcccgaaggaagcaactggtgcaattccgtccggcgctagctcgagcccgcctcggagcacaaagactcctactactagactcgtaacggccaccgacgcggatgttacactcggctgcgcactgtttgcaagtgacagccgaggcgacaagcggaaggtcgaggagggtgccgcgtatggacacgcaggagtgattgggctaaatgcaccaatgagatgtcgacacgaagtgacgtgtgacaatgcgcgtcgccactcctcccccagaaagaaaaggagcgagcccggcgaaaatggaggtcccgtcggcgacgagcgaaacgaagctgcggacgaggcaacgcacgcggcgcacccggagaagctgaacggcgagaggtataggtgcggcgcatcgaaggacgtaggcgaggaagacggcgtgcgcaacgacaacgcgggatggactaggctggccggcgtgcacactagcgacgcgtggcagggctggactggatctggaactggaactcgaacggagaccggaactggaactggacggaagcgcgcgctggaggcgcaactgctaccatatgtaaggttctggttgtgcttgttgtgttgcgagtaaaatggaaactgaattgatgtctttgtctgtttgctgctatccatctacccgagggcgccctcatggcgctcggtcctaaacatgaagtggttggctgaggcgtgcaggagcaggagcttgcgcaatcggtgagtatgcagacgacgacttgggctctctgcgtgcggactcaactgatgatgtggttgtgttctgctcttgcacgtgcaggtcattacagtaaggctagaaatcttcatcaagatcgggtgatatgtaagagcattaaaggcgtgtcgtgtgtgccgtttgttaggtcttagtacactttaagcaaagcattttatagnnnnnnnnnnnnnnnnnnnnnnnnnnnnnnnnnnnnnnnnnnnnnnnnnnnnnnnnnnnnnnnnnnnnnnnnnnnnnnnnnnnnnnnnnnnnnnnnnnnnnnnnnnnnnnnnnnnnnnnnnnnnnnnnnnnnnnnnnnnnnnnnnnnnnnnnnnnnnnnnnnnnnnnnnnnnnnnnnnnnnnnnnnnnnnnnnnnnnnnnnnnnnnnnnnnnnnnnnnnnnnnnnnnnnnnnnnnnnnnnnnnnnnnnnnnnnnnnnnnnnnnnnnnnnnnnnnnnnnnnnnnnnnnnnnnnnnnnnnnnnnnnnnnnnnnnnnnnnnnnnnnnnnnnnnnnnnnnnnnnnnnnnnnnnnnnnnnnnnnnnnnnnnnnnnnnnnnnnnnnnnnnnnnnnnnnnnnnnnnnnnnnnnnnnnnnnnnnnnnnnnnnnnnnnnnnnnnnnnnnnnnnnnnnnnnnnnnnnnnnnnnnnnnnnnnnnnnnnnnnnnnnnnnnnnnnnnnnnnnnnnnnnnnnnnnnnnnnnnnnnnnnnnnnnnnnnnnnnnnnnnnnnnnnnnnnnnnnnnnnnnnnnnnnnnnnnnnnnnnnnnnnnnnnnnnnnnnnnnnnnnnnnnnnnnnnnnnnnnnnnnnnnnnnnnnnnnnnnnnnnnnnnnnnnnnnnnnnnnnnnnnnnnnnnnnnnnnnnnnnnnnnnnnnnnnnnnnnnnnnnnnnnnnnnnnnnnnnnnnnnnnnnnnnnnnnnnnnnnnnnnnnnnnnnnnnnnnnnnnnnnnnnnnnnnnnnnnnnnnnnnnnnnnnnnnnnnnnnnnnnnnnnnnnnnnnnnnnnnnnnnnnnnnnnnnnnnnnnnnnnnnnnnnnnnnnnnnnnnnnnnnnnnnnnnnnnnnnnnnnnnnnnnnnnnnnnnnnnnnnnnnnnnnnnnnnnnnnnnnnnnnnnnnnnnnnnnnnnnnnnnnnnnnnnnnnnnnnnnnnnnnnnnnnnnnnnnnnnnnnnnnnnnnnnnnnnnnnnnnnnnnnnnnnnnnnnnnnnnnnnnnnnnnnnnnnnnnnnnnnnnnnnnnnnnnnnnnnnnnnnnnnnnnnnnnnnnnnnnnnnnnnnnnnnnnnnnnnnnnnnnnnnnnnnnnnnnnnnnnnnnnnnnnnnnnnnnnnnnnnnnnnnnnnnnnnnnnnnnnnnnnnnnnnnnnnnnnnnnnnnnnnnnnnnnnnnnnnnnnnnnnnnnnnnnnnnnnnnnnnnnnnnnnnnnnnnnnnnnnnnnnnnnnnnnnnnnnnnnnnnnnnnnnnnnnnnnnnnnnnnnnnnnnnnnnnnnnnnnnnnnnnnnnnnnnnnnnnnnnnnnnnnnnnnnnnnnnnnnnnnnnnnnnnnnnnnnnnnnnnnnnnnnnnnnnnnnnnnnnnnnnnnnnnnnnnnnnnnnnnnnnnnnnnnnnnnnnnnnnnnnnnnnnnnnnnnnnnnnnnnnnnnnnnnnnnnnnnnnnnnnnnnnnnnnnnnnnnnnnnnnnnnnnnnnnnnnnnnnnnnnnnnnnnnnnnnnnnnnnnnnnnnnnnnnnnnnnnnnnnnnnnnnnnnnnnnnnnnnnnnnnnnnnnnnnnnnnnnnnnnnnnnnnnnnnnnnnnnnnnnnnnnnnnnnnnnnnnnnnnnnnnnnnnnnnnnnnnnnnnnnnnnnnnnnnnnnnnnnnnnnnnnnnnnnnnnnnnnnnnnnnnnnnnnnnnnnnnnnnnnnnnnnnnnnnnnnnnnnnnnnnnnnnnnnnnnnnnnnnnnnnnnnnnnnnnnnnnnnnnnnnnnnnnnnnnnnnnnnnnnnnnnnnnnnnnnnnnnnnnnnnnnnnnnnnnnnnnnnnnnnnnnnnnnnnnnnnnnnnnnnnnnnnnnnnnnnnnnnnnnnnnnnnnnnnnnnnnnnnnnnnnnnnnnnnnnnnnnnnnnnnnnnnnnnnnnnnnnnnnnnnnnnnnnnnnnnnnnnnnnnnnnnnnnnnnnnnnnnnnnnnnnnnnnnnnnnnnnnnnnnnnnnnnnnnnnnnnnnnnnnnnnnnnnnnnnnnnnnnnnnnnnnnnnnnnnnnnnnnnnnnnnnnnnnnnnnnnnnnnnnnnnnnnnnnnnnnnnnnnnnnnnnnnnnnnnnnnnnnnnnnnnnnnnnnnnnnnnnnnnnnnnnnnnnnnnnnnnnnnnnnnnnnnnnnnnnnnnnnnnnnnnnnnnnnnnnnnnnnnnnnnnnnnnnnnnnnnnnnnnnnnnnnnnnnnnnnnnnnnnnnnnnnnnnnnnnnnnnnnnnnnnnnnnnnnnnnnnnnnnnnnnnnnnnnnnnnnnnnnnnnnnnnnnnnnnnnnnnnnnnnnnnnnnnnnnnnnnnnnnnnnnnnnnnnnnnnnnnnnnnnnnnnnnnnnnnnnnnnnnnnnnnnnnnnnnnnnnnnnnnnnnnnnnnnnnnnnnnnnnnnnnnnnnnnnnnnnnnnnnnnnnnnnnnnnnnnnnnnnnnnnnnnnnnnnnnnnnnnnnnnnnnnnnnnnnnnnnnnnnnnnnnnnnnnnnnnnnnnnnnnnnnnnnnnnnnnnnnnnnnnnnnnnnnnnnnnnnnnnnnnnnnnnnnnnnnnnnnnnnnnnnnnnnnnnnnnnnnnnnnnnnnnnnnnnnnnnnnnnnnnnnnnnnnnnnnnnnnnnnnnnnnnnnnnnnnnnnnnnnnnnnnnnnnnnnnnnnnnnnnnnnnnnnnnnnnnnnnnnnnnnnnntcgcccttcagagcttgcgcttgacttcccaccactacaacgagggttgcgagtaagctgcaggaccggggccaacgtcactgagcggctcgcggctcagagctggtgtaccgccgcgtgggcgccatcggcaaggcttgggtacgccccaatgggttgcagttggctgcaatggctcgcgcctgctctacgcgtggtagtattgctccttactccattgacaaaccgcagtgcggacgacgtttcactacatcggaggtgcagtgttgggctccgaggagttgagctaggccatagtaagcaccgagtcgatttctagtggcgcaaagtggcatctgttgctgagaaggctgcgctgagaaggctattagcgagtaccagtcacgtgcacgaagcagctagtgtacgtgatgaccatcgtcaaagggcaacgagcgacacgcagcaactgtagccaaggctctgagtgccaggatgcttccaaggaccaacagagcttcaaggagagacgacccagcagcaaggactacaacaggaacaggatcgaggacggacgacgcaaggagggtacgcagtactggtaaagatatccgaagcggcggcgaaagatagcgagcagcagtcaagacggcggcggcgacggggtgaacaagcggaggaagagtcgaagagagcatgacatcgaggatagcacacaaggggcgtggaagaacgaaggggaaactcgccgacgtgccaccgcacccaaggcaacgaccaagaccgacgattgaccaaggtgtgctggtcagaagccgttggccggcacccatggcgcccacgccaccaagtgatggcagtaaaagtgtagtcagtatcgaaatagcgctgtagggtacagatcaacccatacagtagagccaagcagaaagtaacgtcaatacacgaagcagttggtcgtagcaagtcgactaaggtcaaagtgcagtcgaagtgaagagcccggtccgaggtgacgagcagcgtgcacacagagtcacagtgcacacgtgcgtccatcgacgaccagtaccccgcggacacatccgccggaagggagaacccgcgagttgtgcgcgcacgtgggcacagttcacagagggacagctccagtcagctatcgcctacctgggcccgataagaagcggaggggtcgaggatcacgtgccagcacctgggattggcgacgtacaaggcgttgtgcgtgttggatatcgcgtggagcggtgtatatttgtataggtgacgaattggcgttgctagccgccgaggaccccggcgctgcagagccgcggactcggacagggtgcggacggtagctgcagaagggcagatcgcttactccatcgtcatgtcggccctcggatcgggttggtagaaatatgtcggtagtgatggtagtactcgctgaacggcaaactggacgaggcggcggcgaacttcacgatctgcaattgttcgtgaagaaaacgatcgagaacccgacggccagagttctagtgtacccccgggcgacaagcagaagggggaggcgttatattgctcaattgaaggggcaagccttttgactcgtggttttctccttgtaaggctgtaagacggtcaagagtcggacccggggcaacatcaacatcagacttccgggttatggtttggtcgaatccaggccagacgctacaacctggcactataagcggctacgctaggcaggttattggagtgcaacacccatacagtattttggtttgcagtgacgcagacaccagttgagcaacactaataaaacagttctatacgatattccccttcactcgattatgcttgtggctgcttgtgactgcttgttcacagcatcccgaaacacggagttaatttgacatgtgagtagcgacagccaataacacggcggcagggtgaaaaagtattgatttcatagcaacaggagaaggcgaggccgaggaggttgaagagggcaaaccagcacatcgtagccggaaacaaattgtgctggatcgcgcgcacgtccattttgcggttgcggagctcgaatcggttctctgccttcgctttctcgtgtcgcgggtgcttagtacggatggtaccggtccgatcgtccgcctgatcctccttgagaacccgagccgccctgacggtagccaccgccataggcgtagctcccagagcgtagtccccgccagcctggtcacccgtgcagaacgcactgcagagcaaatttgaagccacgcagctagagttgactgagaagcggcaacatgattcccgagtgaaacgaactcggcatacagaggcaaatgcagcaacgtgtcaatgaaccgtccagcagcagactggagcaacagggtggaacgattgagcagcagagccagctcatccagcgcctcaaagaagagtagattttttttttcttgcctagcgagcttctgccgttgagcgtgctgaagatcaaatgcatgcttagcatttactgaagagcaacatatcggctcgagtgtgatctagcaaggagccacaaactcgacgaacagataagagaactgtccgagacgtcgcagctgctcgccgaagacatactccagatgaagctcaagctagcaggacgagaccaaatgctactgaaacgtggccaaaagtatgcggagcttgctcatgctaaccgcgtactgagtcggcatgcccaagcgatagaactatccgagcgcgagctggttgcagtgctcattccgaccaagaagcgactggcacttctccgagacacactaacaaggttctgctacgagctggaggggataagatagcaaatggtggcgagtcgcagtcggttagtgcaccgagatgaccgagtgctgatgaattcgtgactaacaccttggttcattttgctctttagcgaagtttcacttgttgcgtgaggatggcaagcgaaatcgagagctgcacagccaaagtgtttctgctagaaacaggtacttcgaagtaggagagctacctgtagattaaagcgaacccggaggagcacaatctgactaacacttgnnnnnnnnnnnnnnnnnnnnnnnnnnnnnnnnnnnnnnnnnnnnnnnnnnnnnnnnnnnnnnnnnnnnnnnnnnnnnnnnnnnnnnnnnnnnnnnnnnnnnnnnnnnnnnnnnnnnnnnnnnnnnnnnnnnnnnnnnnnnnnnnnnnnaatgtgttgacatcaggcgctataccatccttgagaataatcctatgtaaacgcatattcctggtatgaatcataatcctgacatcgggaataagttgatgttgatggcctgttggcgttgccgttgttgcaaccgccgagtacgaattgcatccgtgccgccatgacgagggactcgacgtccgcgtcgtcgtccaaggcgcacgcggacccggcgaccgaggcgagcgaccgcgatgcgcgcgtgaacgtgcggcgctagcgcatcgaggcgcgcaacgcgtccaaggatgacgcctcgcgcaagaagcagctgcaggtgggcgagtcgcagcgcatgagccgcggctagcagcaggtggccgacagcctcaaccagctggaccgccgcaagcacgcgggcatccaccaccgcgtcgaggaggaggagcggcgtcaccaactcgagtcactttatcctacacgtcgagtccagtatgatgatgatctgcaggatgatgaagagtgccgacgccacgcgcgctatgtccacgtatccggtgaagaaatctacccccacacactcacaacaatttagcactgtgcagtactacgatctgctctacctccacagaagtgacctaccattggggatgaagagcgacgccagcaccatgccaaggtagagcggcagctggaacagcagcatgcagcagacactctcgcagcctctggccacggcacagctcagcagcgccgtgagcgtgaagaagcagcccaggctgaagctgatgcggtagaccaactggttgcccacgcaggtgctcgggtacgccgagtcgtcgcactcgtcgaagacgccgagtctcgacagaacgtctgcagcattgaaggtatccgtcgcactcgctcaagtatacaaggacagaggggattgagggtgtgctgatgcatactctggccgaaggtgcgcagcagccctgcggccgcggcgctcacgaagaagagcgcgacgtagccgactcgggtcatgacgatggttgaaagagttctgaaaaatgagtcagcgtatcaacgccttagtttcgaataagtatacactcgtgtcttatattggtactgtgcatctgtgctgaactaactgtttgggtttgcagtgtacatttccaggagacaaatgcgcagaagcgtgctgcccctgttgctcggatcctgcaccgctcagtcagcggcaacacggagggcggcaagaaggccacaaaaggcaccagctcggctgcgctcaaggccagagcccggaaggcggagaaggaatactgggccaacatcgtcaaggtgttccccgcccagaagatccgcgtcatggctacactcgagaaggggctgacgcactacaacacggcgctgctgcggcgcaaggagctgatcgacgaggtgacggccatgaaggcgcagaacgcagagctcaagaacctgctcaagcagtacctggccgcccccatcaacgaggtcctcatcgtgccgcccacgcagatgcagctctaccagtgacaggcgaaagcgaagttgaagtgctacttaagcgaaatggactcacaatacccatgcagagcaaacatcagcaatgtctgcagcgacgaacctcaacgaactgcttgatgactcggatgacgtcctccgggccgaccataaggccccacgatgtcttggccccgtccttgccgggtgaattgccctcccggttgttgtcaccactaccaggaacctcttgtcgcgggtcctcgaagaagtaccccatgagcttctccatgtcctcctcgttgtcgcgcgcacgatcatgttcacaagctccgcctcgtcatcgggcaaattctccagcgcttgctgcacgctgccgttcaccaggaagccagccttggacgcgagcatcttcagcatgtacttgagcttcgcgcccgatattttcttgactggcggcgtgtaggcttcgaccgattcgtcgtcgaaatcgtcctggtcggcgttggcgccattgtcgtctcgcctgctgccgcccttatcgctctcgttggaatcgggcgacgactcgtctccgttctcgagctgcttctggagagctgccgcatcgccagcctttgcagactgactccaattacggatggactgagccggtggccgccacgcgaggccaagctgctgctcgtggatgatgcgatcggcgtccagcagcttctcgatcttgtgaatcgcgtcctcctcgtgcatctgccacacttcgtcgtacttgttgctgtcgctggtttcgaagtgcgcgtacttccgctgcaggtcgaggtactggttcgtgaggcgccgatactcctccgtgagctcctcgttttggtgtcggtcccgagcgtcggtctggttgtacttggcgatcagagtggccagcgcgtctttcagtcgagacagcctccgcttctgctgactgagcgtggccgagttcaacatgtcgcgctccgtcagcactcggtaattgtactcgagcctctccgtgttgagctggtacgtggcgcgcatctcttcgagctgctgctcgagcgtctggatgttggtctcgagcttgatcttgagctcgttgtagtcctccgcatcgcgcactcgcagctcctcgatctcctgcagatactgctcgtcgcgcgtctgcttagcttccatgtagaccatctccatctcgcgtctgcgctcgaacagcgagtcgatctcgagcttgttgttggcgatgcgctcgtcgcgctccttgaggaaggcgtcctccatctgctcgagctcgagctcgtactcatcctgcatttaccggtactgctgactcatccgatccaccagcttctctacctcttcggcctgcaccttgagcgccgccacgtactcttcgtccttggccttgagctggttctggaactcgcggatcaccgcgtccctgccaagatctcggcgcacgcccggttctgcagctccagctcgttctgcagctccagctcgttgtgcagctcctgcggcatgctgaactcgaagaggtcggcccagcgcatctccacggcggcgttcttggcgccgctgtcgacggcctcctgctgcagcttctgcacgcgctggtgagaccaggagacgttggttgcctctagcggagattcgcctgaggctgaaggtgcccgcattgtgtaaatggctcaagtagaactacagtacaattctttcgcatttgtcagactacaggatgccatgaacgcatcacttcccaaaattcgccccggcacaattcgcgacctttcgcgaaagttactcaaactcagtaagctgcgacaaactgatcctgattcaatccaaactcagtgagctgctccattataatatatagaaatcagaatattacaccgtaatgtacttggtgaagttatattagacactcccgccctatccactccaaatcgggtggtaaatagggagcatcaacctttatgctttaatgcgttgaagttggctgcaaccacttttcatcacgactcggaagtcgaagagcacgacgttccaagcgcgaggatgataaagacactcgtggagccggtgaagaaggagagggcgaggggcagctcggtggattcgacagcgctcacgcacgagggcgagttcatcactgtgcactttaggggcaaaaagcgcgagtggaagtggcagtacttcaatctactacgccaactcaccgccaagccttatcaaccgatggaggcgcaaggttcgcgggcagagctgctctgtccgcagcattcaactggccgagcaactgctggatgatctattaagcagatgcgagggtgactttgctctgttgttgtggaggtggtggcattttaccgtttgcaaacggctgatgagcctgattgagcgccgccagcctcgctgagctctccgtttcgttcaacgcgtactccatgatcgcctccagccagcgcactttcagatccgccttcattcgggagatatgcgccccggggtcactaagatctggaggtgcgctcttcgctgctgcgaccgcgtctttcaggtcttggatcctcttcttgtagctgtccgttgggtgtttaaagttgatccggtcaatccacgccgccctctcctctcgcgacagcatcttgaacagcgtcttcagcatcttgagacgaatagcggcgacatactcagagttgacgtctagtggtgaagcaggcgtccttctgctgcccaagtcttgcactactgccagagcctttgtccattgtccatccagagggaaacgcgcccagcacttgtcaatgagctggctgagttcctactcttccagcatcaacaagaacgtgttggatacaagctgcagtagttgggcgctggataagctgtggtgccgcaggtagttcagcatgataatctggaagcgctcgatcgatgctgctgtggacgactgggacatagatcgcccgtcggtcgtgtcttcttcgatctcaatgtcaaagtccgacgcgttcacgctggctcgtcgtagcttccgggccttgcgctcattgtcgttcttctcgtactctttcgacagcagaagccactgctcctcgcgtccaggtcgctcaagaagaaaacccccatgtcggggctcagcagcttcaagaagaacacgtccttgggactaggacgcggcaccatctcacctctcgtccggtagatctccgaccctgccagagcacgtagcgaggtacaagcggaagagcgactcgcccgcattaggcagcgcgtccacgacaagctccagctgatccatgccttcagtgtaggtcaagtatgcaaaaagcacatcttcccgtgaagatcgaagtgctcggaacgagtcggcgtctaccaaccccacgatagcacagaggatcatgtctcggccgctggagctgaaacttgcggcgttgtgagtgatagcgcggcagatctgcgcactcgtagcgagcggaacatgtacagggtagtctggatcattgatccccatttctttccgtctcaataacaacaaaccttgttgttcttgcaaggcattcacaagctgatccagcttggctgagttggtggcgtagacctttgcgatccccgcttggacgtgagcgaatggaacgtactggaagattcgagccacatcatccacgctaactgctcgcagcacagtcggatccgtgatactccgacttgctagaagcgtcttcttcagctcgcgaacgcgctcaaagtacggagtgcgggagtaaaaactctgcacgagcgcgaacatcgcgtccggcgaggttgcgtccgtgactatggacgacaatgaggcgtctggaaggtagatggcgccttggatccccgccgacattttctccaacaacgttcggtagcacccaacgatgcctagcatcttcagcagcgtggcacagcacgctgctgcttccacggcattcggtcggccgacttgctccacatatccctcctgcacctcgtccagcttgacctcagtgaacatagcgaacgaagcgaagttgccacgctccacttcgtacgaccggatccactcttcaaccgtctcgcccgatgccaggtgggcgttcaaccgcttcaactggatcacttcatcatccgagtcttcgagagctccttttggtgcacgaggtgaatcaggataacgggatggcgacgatggaacaactggaagatgccgctgctgctggtagtgtcgtggatagcgcggagactcgctctctagagggtgaagccgctctcgagcgttcttcttgcgcttaaaattctgtcgtaagacaccacacgtgtgagcttcaacgagtaagaactttagatcatggagggataatacacgtaccttgatagaactcacgagtccgctgccgctaccaagtgtgctcgaatcgccaacagcttcagcagatctcggactcaatgtattcggcgacaccggaatatacacgcgcggactggaactcgatgctgtaggtgatgctgcagaaatcgccgacaccttgtcggagcgtgacagtcctgtactgccgttcatgcctctccccctctcctcaatgcaaacctgttcaacatagcgcgcgctccaacgacttgacgtcgagagcgcacggccgctctgcttgttaattcacgggcgttttagagcgtcaccacctcagcataattagcacatcgactccggacattggacatgttaggtcgggtggtgcagttcacctacgatttccagaccccgttaaaccttggccgatcgatcgcctcctcaaatctgttcaatcaacgaagcgtacgtatcacgcagcacttgttccagaagctgtcgctgctcttggggctttccagtcgcctctgctgccctccctcttgctgctgcccgagccactctgcagctgtctctgcagcttcaagaggaaatgcaccagctccgcgctcgggtcggcgttctgcgagcatgcgtgcacgatccacggcaacacttcgcccagcaggttgacgtatccagcactgttctcgcccgagcttccgacgccgttgcgaaacttgttccaaaccacgcgcagcgcctactgcatcgccgcgctttgcttgctaccggagagatgcgcggcacacaacgagagcaccacgcgcagtcggaagcgccacttggggaggtccttctcagcaccttcagccacgaaccccatcagcggcttcgtccccggtgtagctgagcgagacgacgaagaacccgacgagttggacgaagttggtaccatccagtggtcccacatgagcttcatcgccggcatatgagccactaacgttggtaccagcgtaacatcgtacccctgcgtgtgcatcgccagcaacaatcgagggggcgacggtgaagacacctcagcatctgcagtcagcagctcattgacgatggtgcaaagcagagcacgactctcctcagccacttcgttgtcgctggactcggagctcagcggttgcaatcgcttcagaatgccgtgcgccagcaagcaatcctggaggggctggtgctgctgcacactgacagaggtagatgcagccgcagacatgccctctacaggcaccaagctcgggtcacacttggtcacgtggacgttcgccgctgctcgcacgtcgcgcacaagtccaagtagcacgcgcagcaacgctggctggcggaacactccctcgtgggcgtgcggaatggctcctccagtacctgcatgtaggtcagtagctgcaatctgccttggtttgtctgcactttttgttggcgccagagtgcctcccggaagcagagcgcatgaaccaaccgcatcaatagcgagatactcgcagcttgctcgcgacgagcccgagtctcatagagcgaggctagttgcgcgcagaatgcagccacttgtcgacacgatgctgtcgacttttgcgaggcttagtactgcgtacggaaggaagccatctaccagtacctgcaactcgcgcatgacaacttcaattggtgctgactgcagctccagtagcctctcaagaagatgaccactccgtttcaaaatgaaagcacgattggcgtcaaaatgcgcccttcaaatcaattttcaactttttcgcgtaaaaattgtaccacttgaactgctgaaatctcctcttccaattgatgtgctagtttacctgaaccgtttagaattgacctttgtacactagaatatcgtatggctagtacttcttagtacttctctggtccaccgtactatcgccatttcatgaaaactaccataacttcactatttctacttcgttttcggtaaaattaccaccaagcgaaagcttatctttactgctacgaaacgtctatttctaagccaatcgttgctcgcgtagaagaagataacttgacttttcgcgacaagattttggacccagtgaggttttttgtcgtagttctctgaatattgagcgatattcgctgcgactctcaggttggaactcggaaataacttagagcacgtgaacaatgttgagggtctctaaacgcttgtatagcgcgcaatgcgtttcctgcaaatcgaggtttaaccacctgttatgctgaaatcctcgcgataatcaaatttactgacatctgattggcttagcttgaattatgtggaccacattaaacctcaatggcgatagtaaggtcgaccagagaagtaggcttttctcatcgaaaatgcccaagtcatccgtgctttgaagatgtcagtaatcccttccatactcaaaccaagtcttatttcatgctatctttctcaaacaaccttcacggtgaatcatgctttcttttttaaacggagtggtacaccattactggatcaaattgagaattttcaagatcaaaacaagaattgctcagatcaaaacaagaaagcctctatgatttggtacgcataacaactaataacctctctgtaaggatatttggagacgagactccgatttagggagtttatacgtctctcatatacactccgctttacttcttacattatttctgagaatgggttaggatcgcaatttagaatcgctcacggggaccaaaaaatgaaaaaaaaatctcggttaaacaacattttgatggctattagaaggtggtatgggctagtatcatcctgaactgaaccgacgtcactatactacaatgccataaaatcagagggtcgaagttatgaaacagcaaattcgaccgttagtatggaggacatcagaaatagacttaaacgtgacattttactcttatttgggcccgctcagggccctttattaagcctatttgcctgctaaactttatgtcgtcgtaaaaagggtcgctctgcggccgctgggatcgtttggccagacgagaccaagcattcaagcagagactcaaagaagtgccaacgctacgctaagtagcaagcagctttccatgctgatgaccgggtagcggtacgcgccgtcgagcagcaactcctctagattttattgaatgctgtgcactggacgatgatctggggcatacgagccggagttcgtgtcgttgcttctcgctagcaacaatggctctcttttggtccttctccaagtccttcctgcacgctaaaggctccgattatttgcttctttctaaggccttagtgtaatgggcctactttggctcactactttagcttacacgtgtgcgcgcgtgtatgaggaaacgtagcttagtttaatctagagttaattatactcgggcctccgagtatagattaatctaaataaacgctccaaataatgtttttgggttaaaatgagaactgctatttttgttttatgctttctgacttcttctaaatgtaatattctaagttaggaatctgccaacggctgattggcagaattccaatgctatgcatgtcgctcattggctaaaatatgctgctttcagccaataggaatcctaagtctctatggaccacccgtcgtggtgatcgtaaatgtatctagcctttggtgtgtctacaccaaggtcgagaaagtctttcgaacctctaacagacgccgggtctgttagagttacaagtggctgtagccacttttgcgtgtaaccctgttacaccatccccccatcaaggttagacgcgccgagtcacggcacgtcaatcaggaaattgaccattcgtcaattcttcacgttgggagaaagaaactcgagctcattccgcaaatgagctcaccgaagaagaagaccgccgctgtagcagaggagaagacctccacggagacagagaggttctctgtccccgagtactttgagcgtcaccaagcaaagcgtgacgctcttgctgccaagactgcggcggggacaacccagccggagattgtcctcgaaggttcctcagtagtcaacgacgccgttgactacggggacggcgacgtggagatggaagagggcggagcctcgtcaagcaggcgcaaggagtctatcaacagcgatagtctggacccgcacgccgggtcgagacgccctcgtgaaggagacggctcggacgcttcgagctcgaagcgttcgcgcggcgagagcaacactccgctctctgctgctggggctttgagtaccccgcgtgatgtggcgtcttcaagttctccgcgcgctgcttgagcagcgcgcgatccgtggatgccgtctgcgtcagagatcgcagaccgcgtgggcaacaccgtgcctccaaacaaaatcccgctgtacgtatgcagcggcatccacgacggtgctgtggcgaaggggcagcactttgatccgttaacgaatcaaaggcgcgactactacatcgggctcttccacgagctccggtacttctccagcaagaagacctcttctcgcagcaaagtgcctgagtggcaggcactttgtcaaagttggaatgcttttgttgagaacttcaacaagaagccggctgcttaccgtgagcgggttaagcacgcccgtgaacgcttcgagacattctcgacgcgcgggaggttggagcagctccacagatcttctgtggacgctggtattccatgcgctgtgcccgaaggccaacagtgcacgttgtgtcttccgggtacggcgcgcttgagcgaccgcgacctaaacgggtacacgacgattcgtgtacctgcgagtctcaaggatatccgtgccaagttcttggcacgtgaggaacgcgacgatcgtgggacctcgggcgctgtaggtgaccacagtgctcgcactaccttcgcgtcggcagtgcgtggtgagcttcgtacgccctcaccatttccggaacgtcctgcagcaggacatcccgtggctcccatgtatcttggtggggcggaaaccctctccaacgaatacgataacgaaccggctgacggttcgttttcgggatactatggttcacaatacgctcaacaatccagcgtgttaagccgcgggcgtcgcagatcggaggcggcggtggtggtaacacgccccgggtatgatcaacctggggttgaccttggcccgacgctcgaggagcgagtcgctgctgtggagcagcttcagagccgtgagttcgccgctctgaagcaggagatggcgaccctgagagctcaagttgatcaggcctcgcagagcgcgtcggacatctctatcgacgtgggaggtcgcgtcgtgcgcttgtcccaacgcattcacgcgctggagcagaggttcgcttccgctggggcttccgcttcgggccagccgagctaggtggctcgtgctgccggtatggattcagccgcccgacgtaaaaggtcggatggaggcgcatgctagatggaatatctagcgtgtagacgttgccatgtcgtgccaacactatgaacggcccgataaagcgcggagcgagcttgctcaccccgaagtcggaaactgcatgtttaggcaggttttgagttgctaacaaaaccaatgaacccttcttgaattcattagtgttgcccctaccaacattgactgcgttcagcttctgtcggtcgacagaagctgcaatagcgtcttggacaaaccgaatgacggcttgtctgcgctgcacgaagttgattgcgtccgagctgaactcgttcagctcgtttctagcagtaggcccggcctctgcgttcgtcttcgcggtgtctgtgccctgcacagactcgttcttcttcttcttcttgcgcgtagtcgcggctgacactgtgcaagtgtcagcggcattctgcggctgctgtgttgcagtcgtagatcctccccacttaaggaaggagccaccatcccgagtagactcgggaggcgtgcgtgcctgatggcattcacgtagaacggtgtatgtcaggtcgaggcatgcaccgagttgttgatggcgaactccgtcatcggcaggcactcgatccagtgttggaacgagtgagcgtagctcttaagcacgtctacgagcacgcggttcacgcgctcggtctgcccgtccgtctgtggatggtccacagtcgacatcgaaagttgtctcccaagaagtgtaaacacttcttgccaaaggtgtgcggtgaagcgtgggtctcgatccgccacaatgtcgatcggcatgccatggtgtttgaacaccatgtcgacgaacagacgcgccgtctgtttcgcagtcacttcagcgggtaccgcagcaagatgtaccatcttgctgaagcggtcaacgaagaccacaacgcccgtgttcccctggctgtccgggggaagaccgaacacgaagtccaaagacatggactgccaacactcccgtggagttggtagtgactacaagggagcctgcgcgaaaggcgcaggcttcacacgttgacaaacctcgcaagcacggacgtacttgtgcacccatttgtactggtgggctcagtagaagtctcgcgtgagaagaaggtatgtcttctcacggcccggatgccccgcagtcggtgcatcgtgatactcgtacatgatcctgagtcgcaggtcatggtcattgggcacgacaacgcggtccgcgttggtagtagacgacacgatcacgactctcgtgatcgtgctgcatcaacgcacatccaattgcgaagtcggatgcgtcacacacaacgtggaatgggcgatcttggtcggccaccgccaagatcggcgcctcagtcaagcccgcttgactgcatcgaaggcctgctaacactcagcggtccaaacccactcggcgtccttcttcaggagccgtgatagcgggcgtatcatgcccgcgtagtccttcacgtacttgcacaagtacgtggccaagccaaggaactgccgcagttccttgacgttcgacggcgtcgggcactcattgatcactctgaccttctcagggtcagggcggacaccgttcctagtatagactgtaaacggagtattgtgtccacttttaaatttccctcgatataagaacactcacaatctatttctactcttctagttaatttgtttataattttcacattcttctctttatatctttccataacttcttctttatcatttcaccatcaacctttaatttcacaacaaccattaaaatatgtttcgatcaagtcttaacatgctcacaagtcaataaaaaatcgtctacaaagctaatattttcttaagttaacggagcattgtttccactttttattttcttaagtaagtggtcattcaaacgttttctatcttaagagataaaatcttaagtataataacaacatatcatacgatcaaccaaccaacaacaaccaacaatgactgctctatcattcaactctaagcatgcaactcttgagaagatgcttaaagaagatcatactgtgcttggctaatgaagcagccatggtttcagaagcgtaaggaatacaatattgtgaagcttatgtttgaatcaaacccaccacagcttaagacagataaatcagacgaatcgaaagaggagtcagtaagagagattcttaattcaatcgatttggatgcgccattgagctttaagtattgcaaagcaaataccattgaagattttatttacaatccttcgagttttatcattggtcaatcttggtttaagaagcgtccggagtatcatattcttcgtcggattaatggccgtgccctacctaagcgtcaatgccgtgatcctaatcacaacttttatacgatggaaagatgtcatctttgtgaaaaacgattgattgaggatgaagagatttatttagaacaagaggcgctttacgaagctgagtcaggtagaaagctagatgatgaaattaccaggagtttgggtttgtcattgtattttcttctaccgtattataccaaagccaaaatgaatgtaatgcgcaagggtttccctaagcataaagcatatttcaaatctcatatcgctcaagaactaatcgcagtcactatgcatccaaaccgcatccaagatcaaatgaatcagttcgatgatattgagcaatacttcacaggtatgggatactaattaatgaaccaacaacttttttatgtctcctatcaaagattaaaaaattgatgatttagtgaagctcactgagttctttcaccaaacgtggacacttctcagtaacaaacttgttttacgaagccaatcagtatagttaggatcaagcgcatgaactgttttaagttttctgtttttgtacttaccaaaattcataacataaccatcatcatctgttaactttgattcaagaaattttagcatagcatcatttattaaatttggttggttcttcagccagcggcaataaccaggatcagaagcaaatacttcttcaatggtcttacctttaaattttccgaaacttaactcagtcgacatgttggtcatatatacagataggtataagaaacaataaatttaattaattaatttagatgttagatacttcaccagtaaggcgatcgatatctagggagcgctcatacacgacaaggacaaggatattcataccggtagcgcatccgttaattccgcttacttgaacgctttgcgggacatccttttcactgacgcgccagcaatcagcaattagaacacgatgatcatatgcccagttattggaatcgattaaaccattgcaaatctcacgagaataatcaccgttgatagccgctagcttcgagaattcatcttggaagttttcattgtcatattcatgagttttagagaatacgttcgaagtaccaatcgttacttggaagtttcgaatgcttgcaccaccaaggagcgctgtcaaaaggagattagaattgttgagtaccatgagcgctagcgaagtgacccttcgacgtttcagcaaatggaagcagagcaacatatttgatgtttttgaaagtaccagatagttgaaagttgaagttagcattgagttgtccttcaatggtatcgggcgtcataccagcgcgattggtgaagtattgagcataaacatcattaaagcgaatatgcttaattggtttgttaataatcgcagtaggattacgtagatcatagaaaggaatgtttagacgagtagtagtgtaaggcacatagttactaacatcggcaacggtagagtaatcattttgaagaacgccaaacgagaaaccgacttgtttgccagcgtctagtacagaattcataggttgtcctgttccggcaccggagatcataatagggcaagtctgaccagaagtcatggtcacactatctaatttcatcgtagaagccgtcccgctaatttttttacagtaccagtattaaagcgaaggcaaagcttgaactgagggttcgaaattaaattgagctctttgaatagcggatgaagatctacaagacgaatcttgagcatatagatccaccgtcctaaaataccagtcgttgatgcatcagcagcagccgattccctgaagcaacctttagcattttgaataacgatgttattcgtagcagttgtacccattgatgcccatccccaagaaggcgtggctttcgtagcatcaacatcgtagtgagacgattatagtggccggagttaaaagctttattttcctgagcctgacttatcgtagagtcaagagacgcgtcgagtgctacttggttattagagtaaccatcaccagcggaatgagcaatacccgagaaattaatcgaataccaatcgtcaggatatacgaacgaatcagcaccgtgcttgttaatatcatctagcgaacgttctgtttcagcgcgtagattattccagaacatgcggtattctccatcagatagaacagtctgtccattcatttctaggcttggcgaatcaacaacattagttacattacaattgagagaacgagcaaatcgacttagacccgatgtaatagcagtggttccagtggtcttaccagttataacataaggaaccatgatataggcatccttaagagatgcgtagccctgagatccagcagtagctgtagcatcataagtaacgctaccagaggtataactaccctgttgaaggtccggtagcacaaccaccttctttcctttcgtgacatcaacgataggttcactctttagcgagctctgtagaataaattcatccgatagctgagtaacgtcagtcacgatgaaatgataaacttaatactatataagaatatctatactagatagaaaaataattaaatggctcatttaatcaaaggtgttactagtgattcagatttaactgaattagctaatattcttgatattgatataaacggtatatacgagctttctgaaatccttaacccgcttccaaagaaaggtttatacttgatcttgcttcgcaaagacagcgatgttggccattgggtatgcgttaatgacaatgcatattttgattcagcaggatcccttccacctacaatatttggtaacttagactattcaacattccagtatcaaggatcctcagaccaattctgtggaatttggtgtttactttagctttactgtcgtcagcataaaaaaatgaatctaatgaagaacttcactgatttgaacatagacgttttttactcaagtctaaacgaagcaccttgctttgaagctttgcttgctccgcccttccgcatagcgcgtagtttcgccatacgatcctttgcagcctgagatcctataaccatacgacctttggatgaagttttcatgccaatgccagttctttttttaaagttctttcttagaagccctaccaacatagggttttgaccgcgcgataccacagccgctgacgcagcatttgctaactgatcaacacctaccaatagcatcggtttaattacaggattccatgctgatttgataccagatcaatttttcccccaaatagaggctccatgcataccagagccactcttctcaataatagggtgttcgatctcatgcttggtgatgaaaagacgaactcccttgttagccttttttgctttctgagctttgctatacgattcaggctgcacatgaagagtagccccagaaccgtttagctccttcttagttagatttagtttaccatccttcaccgctttacgcagcttagcgatagggacttcagatgaaatcgataattccttatacattcttatagttcgatctatatcactgaaactataaaataattcatttttttatttggattttgacgaattgataatccaattagcatgttgctatcattgaatttgacaaatctttcatcttggtcaacgatcgtaattctaactgaattaaaagatccatccggaatactgacccaattaaactcatttggacgataacttataagctgaccgatagtcgtaccagcggtattaaatgtagtcagtatatcatccggaatagagtatggattttttactaaattacagcgtacttgataacacgcggtagggttaatttgcggtgagattggacttagaaaagattgtttagtgtaaacgcttgacgtcggccattgaccaagaggaaatccaatgatagaaccaaattcctcattatcaataacaagctttggcgtatacggaaaagaggtgggaagaccacttccggcagaagaatataaacagctaggcggtctagtgtaagttcctaatgctgttggaacggggagtaaatcgatctgagcagagtaaaaagttggggtttcgcttaggttgaagaaatacacattattcccattcgaatcaatcaagtatgcgccagctgaaatgcatgcggcttggacagctgagtttatgtttgcatagctataataaccgcttgatagggtaatttgaacagttgagaatgtacgtgcggtaggcatcaatagcttgaaagtgttgttttcatacgtatcagaatcaatgttaaattgcgaattgtaaatgttaatactctctacagcaatctgagcattcttgaaatttactacagagcctctaacgttgtagtgaagctgattgttgtacccatttttgactatagttttagacgaaagcgtaatgttggatgacatatttctaaattagggattaaattaatttaaagaatttggatcaattactctattgaagttaaatctaagctcaccgcgaattgaatctacaaacaaagcctgacctttgctcgatgtagctaagtcatatgatttaattagtcttgattcatcaatgttcttaatgttaaaatcctttgtaaccatttttagatcacttttagaattggctcgtataatagctacgtattcgctatttagccgtatcatctttggcgttgcaaagtaactatgaacaagacagattgtgcttagcttaacccctctaaccccgtattctgtatcctacagaataagcattgtcacaggacataatatccagcaaacttgtcctctctttcgaatttcgcatatggatgtttgtatagccggtattgtgcacatcttcctgttagattagcgatgggaagataaacggggtttattccgcggtaatagacggacgagtataaaccaccaacaggtttgaaattcgggtggaagcctaaaaccgccgcgtgtcagccactcgtattttccttcattccgaaactgcgctgttcaagacgtcgcaatacaagctttgttggggcccgtcgagcgcgcccaagtggccaaggaccatggccgaagacgatcatgatgagcgccattgtgatctacagggaagcgagagcgtgtactttgctctgtaacattgtactagtggtatattgattctacgttgcgatgttgattaccagacctggtgatccgacccagacgacgctatgagctctcgcgtgtggcccgattggcagatcgattgcggagtcagcgcacaacctcatcggttcctacgaagccggctacagccgggtctaccgctatattgtagctgatgcagtggctactcaagaggctacagaagaagcgctcctcatggtgtggctacaccggagactacagaagaagcggtagatgctacgacggatgctacagaagaagctctccgcgtgatgaggttacaccggagattacagaagaagggatagaggctacgacggaggctaccgatgaaagcggcaggaatggagcggcagtgccggaggctacagagcaaagcggaggctgccaaaatggcgatgatggcccacggctggcgcgaacattgaagagcgtgcgcacgtgaatgtgttgttcgcggccgcggccagctccgccggtacgattcgagccgcgtacgcgaccggcaatagtttgtaggcactgcgtacatgcagtagaacggccaacaccgccgagaacggcggctatcggcagcctgccgctgccagtatcgaccctcaggtctagatctagataatgtggcaaaatgtgttgttcgcggccagctccgccggcacgattcgagccgcgcacgcgaccggcaatagtttgtaggcactgcatacatgcagtagaacggccaacaccgccgagaacggcggctatcggcagcctgccgctgccagtatcgaccctcaggtctagatctagataatgtggtaaaatgtgttgttcgcggccagctccgccggcacgattcgagccgcgcacgcgaccggcattagtttgtaggcactgcatacgtgaagtagaacggccaacaccgccgagaacggcggctatcggcagactgccgctgccagtatcgaccctcaggtctaccagttcacagcagtcagctccgctcaccgcgtcgcttgctcgggtgtagaatgtatccatctatgttgctgctggcccccaccaggtcgctgctggcggccaccatgtcgccaccgcaaagcgttatgcagacatactgtaccatagacctccaacattgcttagagagggggggggggattaagtttgccgactctgcgcttgacatgcggcgcgcctccaaggacgcgcgcctttgtacggccgagctgcggttacgcggcgtgatgatcggtacctacgcgcgctcgctccgccgacgaagatgcgcctggtgtgtcgaaactcgcttctcggggcagccgccttacatgtaaatacagcgtcttacacgccattaaaaatgattagatatgacgagtaaaatattgtagaggaccaataagaatagtttgatatcaacatattttaaataatttgtacggtactacaaaaatatcagctttagggtttagtcgctatcagttattagagaacctcagacgccgagcctagattaaaaaatcaaccaaaataagctaatttgggcacgaaggaccctggataaatgatattggggtcgtgaacacctaaaataagccggcccaaggaccctaaaggaccctgggatgaacgttcatccgggtcgtaatatatataggaccctgggatgaacgttcatccgggtcgtaatatatagtcctaaaccctaaaccctagaccttttttcacaaaccttaaactttcacattacttttcacttctttttttcctcttttactaaccattacacaatatatttacttacacctatttttttctttcctttttctttaaaccttttatctacctccctttttacatcccatttactttcattcatctacctatttacttacctctcacatttttctacttaattcaaccactctttcctttaaccttttaatataattcacatttatcatttttacctccatttttttctacatttatattatttaccatttttaccactatttactcttattctttctctcaactatccaaatccctttttaaacttcaccattttcaatcaaacacatcgttcctaatcagacacttatttttcacacatttttttctaaatcaacttacttacttcaactactacctattttatacatattcaacattatccaccacctccatattattttccaacctcattttcacttttcattttatatccaccatccaacaacacatatcctccttctcatacactttttacataccacattccacaacaactacctctatttaactaccatattctccctctctatcctacaacccatcctatccaacttatctactctcttttctcaacatcaatatcctttttacattttaaatacgccattaatcctcaccatctcatttacaaaatccacatctacttccaccttatataactatattcaaccaccacatacctcctcttcatcctacaacccacttttctccaccacccccactctcatttctcaacctcattatccactgttcacctcatatccaccatcaacctacatctctcccacttcgcacacaccatttacacacacatcatacctacttccccctctactacatccatccaaccaccaacccccttctcttgcgtggggtggctcacgggatgcgtccggccatggcgataccgtttgcgctctaatctacggccaacgtaccattggtgccatcgttaggggtcatgtagccactggtggtgggctacgccgcggtccggaagcgacgtgcgatcgccgcgggtggccttcattcccccccaccgacatcgccagggtcgaatgaccccgcacgaggttcattgggtatatctgacacggtcgccagggttacctccgccacctcggacgcgtccccagcgtgtttaaccctcgcgaaccgtgttggcgacgggcggggaggttggtgcgcccgctagcacggtcgtaacgcgagattgccgaggtggccatctcaggtgcagctccagcccacatccatcagccagcagcccctgccgcagagtgcctgtccgcctggatgaacctatccgacgctacatcgtggtcggtgagtacaccgcggtctggaagcgactcgtaagcgtttagtctttttcgtgatggtgccggcaaacccggtgtgcggactacggcccaaagaagtaatatcggccctcctgtgggatagcgcatgccttgtagagccgtacgcgagatacaacttcgatccagtgtgtgtcaacttcgtgtgtgctgcctcttgatgacgctataaccggacatgcaacgtggtccagacctccgtttacatgccgcgtgcgagctgcacaagcacgagcggatttggccgactttacccttcaaatgattacatataggtcaaccacacggccaatcactctgaagcaaggggtggcggccggtggtggtgggacggagctgcgcctgagatcgacacgagcatatttgactttcgggtaagtatcgatgcacgaacggttgtgtcgattttactatttgtgctaaaattaacgggagggtttgtgggagcacgctatataatcgcctgagggctatctagcagccatgcccaccggtaaatattattattcctgtataactagtcggactcagattattaattaacacatgctatttttgaattcatactgataacatgtactgtaaaaacgcagtactgctttagaaaggttggaagttgtgctgcatacaggattttagtgtgtaccacaaatgtatgcgagtggtgagacaaaaattcagaacacgatgtaacaactttgttcaaccaataggctgcacgcaacacattttcactctggacgagaacaacagaagagaagtatccgagccccacacctcacacccctgccagctaggcgacagttaagctattgaccatctcgcctgctacatataattggtatttcggcgctaacaaaggtatcgctcttttactgtggctggacgattgtggatcctgtgtggaagtactggggcatcattttatttcaacctcgacggtggattagtggcagttgaaggcactagtgtttcggaggccgtggtgcggcaataccgcataaaggagttgatctactctgtgtaacttttcgtacgagtttcggtggagtttgatgttggcataagtggtgttgtctcgtattacgttgtggtgagggttttctggaggcgacgtggtggttgtggcgtgggaaggtggcacatgatgccacagtcagaggtcacaaatggcgggttgtttacgtgcgaaaaatgctcatgtgagttagcctcgcaagaagcacgacgatatcacgtccgcaatgagcaccaagaagtcgcaaagtgtgtggtttacgatgtaggtaatcctcctattacgcacttggtcaaacgcgtagaaggtgtattcaaatgcccacaatgcaaatatttctcgagcgatcccaaacttttgcgccaacacaccaagtcgtgcaagaattcaccgcaaaatgatcgaaacttatcggcgaaaatgtgcaaccctgctacgatggtacatgagattggggttgagtacaacaggaagcttggactggttatatgtgctatctgtcgctacgtactatctcctggtgtaaaggaagtggctattcactttaaacgagttcacgatgtggccgttccggccaaactattggagaaaaaatttgacgtactttcgttggcgacaggagcatctcttctcaagtatttaaaaccaacgcaggagctattggagcgagtagacggaattgagatcaaatccggtgtgtgatgtctccattgcgcatacttctgcccactcgaagacacaatgtcgaggcatctaaagtcgaagcataaagatttcaccacggacgtatcgcaacttcagtgcttggtgcaatcactttattcaggtgcaaagacaaaataattcggcgtacaaggtggtgccagcttctcaacgcatgcagacgcttcagatgcagtggaccgtgctctaagtgaattttcacgatctcatttgcatattgctcccacggacgatcgcctcgtaccacctttccttcgccggatgaagtggcacgaggttgttcgtacatattgcacggataaagtttctgaagccatcgcctcggttaaatttggtcccaactcaagctttgttgagttagtgtttccggttgtgtgtcggtattgggagctcagccaagaaattattggcacccgagagtatttgcttgagcgcattctgtcgtcaaaaggaagtgacattgagccagcatcggctttgcgacgcattcaatcaagttccgaaaagtactgcaagaccatgacctcgctactgcagatggttaacacacatgccaagcactacattattacctcaagctcttctacagattatgatctggctgatcaagtggactctctgttccaatcgtgctccgaagctttcgcgtcgatctccactgagcactatagagcggagcatgtttgtgtcgagcaacttgtattgctagatggtgcccttgaaaagatttttcgaattgatttggaaaatgaacactccccaagcgagtttcatgcatttccaactcatcgatttgttgtatgctcttctatcagtggtccgacaaaacatgctgctggctacgtacagtttaaacaacctggtcaagtgactagtttagtcgctatcttaaagtattgggctcgaattgctgctctgatgaaccttcatcagctgtcgtggggtgtggaagccaacgagcaaattttggcgacgcgaaaaagggcggaggcgctacgtttttatcttaggaccgggtatcgaactccttttaatctgctgcaggaggttataagttttggctcaagcatcgccatggcacctgagcaacggcgaattcctcaaatcatgtggctgggatcggcgcatgatgcgctcccagttgaaggccatcgtgttaccttgaaggcgcttcacgacttaaaagcaaagcttgtcgaccagtttggtaaggtgcttcgtgaaaatgtgcgtttgggctacgatatatctgcggttgaaaaatatttaatgtcggatgagcagtgctgttacgacgactacagcaattatagctgtggatacagctttctcgaagacgacaggaatccatggagatcgatgcgtatgcatctggttaagtatcttcttcagactcatcgctccaagtttatcgtcaaggtggtgaatggtaaaatcacatttggacttgcttcgctgtcccagtggtgcaaaaaggttgataagctcacgaagcttcttgcacctctgatttatatcacgtcagggcagccatcacgagctgccgagctaagcgcttcgactttaagaaacacagtttctggggaacgatcggtatatattttgaaccgtgaagtcatgatcatgcaaagatttcataaaggtctgacgatatcgggacagcatcgcttaattgcgcgattcctgccgccggagttgacgttagattttgtgatctatgctgcccttgtgcgtccggcacaagaatttttcttcactcaactacaacgtgggggctttacttcggaccgttctggagaaggtgacgctttgttttactatctcttcagcactacagggcagggcagactgaatgggaaaggttgccgcgctgcaattaacatgaattttgtaagttgcggtaaccaactttctgctcggacttacagacacgtcgcgatcgcattcatggagaagaacattacatcaacaagatcgaatcaggacagtttgattttcaagctgctcatgcaccggcaacggcttcgacgttgtatagccgttctaccacggatccgtattttatgtcgcgcgatgatatggccgaatttgtttcttgttcccaccagtggcataaccttctcggacctggtaactcgaccagtaccaattgttacgccccaagtgaccaatccgagataatgccaaggaggaaaagttcgccgacgtcacccgtgcagcaagtttcaagattcaatcaacctgctccgcacggacgcccaataacagttgtcgtaccaacgttcagcttttttactattggcgaagctataagcagcttacttccggaacactttgggtcagctcggattttgctccgatcatttcttcgtgaccagactgcttcgtttcggtcaagagagcagtgtgttgcaacgacactggttttgcagagcgtctctaatttactcgttgtactccctacaaatggtgggaagtccttgctgttttatttggccgcattttcggattctacgcgtgttgtcattgttgtggtgcctttggtagcacttttattggactcgcttcggaagacagaacaattgggaatcgagtgctctgagtatcaacacgatacgagtcctttcacagcgctaccgtctattttgttcgtccgagtaacgtacttggagcatcaaaatttccggacgttcctactgtcgctacaggagcaggacaaactaggcagaatattttttgacgaggctcacttggctatcgattaccgcaggtgcatgtcattcgtctatgtgttatcgtccatttcggtccagaagacactactgacggcaactcttccctccacttgggaaaatgacctcatgacaatttttggcttccctttcgtcactgtgagaacgccgacagtccgagcgtcaatacgttacgaagtggtggaattgttatcgaatacagatatgatgaaggcatgtctatcattgatgaaacttcctatggcacatcctgacaaaggcattgtctttgcgttgacaaagccgaaggtcgaagaaattgcaaactatttagagcgccatacgtccaacgtggtcgcccggtatcatagtggaatgactttcgatgagcgcaagaataatttgtcattgtggaagtcccctaactgctcatatattgttgcgacgtgtggattgggtcagggtgtggattacccgaacgttcgaaccgtactacattttggactagcccacagcttgaccgattacgcgcaggagacaggtcggtcggggcgtgatggtaagccagcaaaatgtgtcaccatataccgtgaaacatacttccagcgcttttcgaagcatttgacagtggggtcatcgagcaataagggtgaatatcaagccctagtacgctacgggcattccttttagataaaatccgctgcaggaggcaacgactacaagaggcaatggacggttcgggttttccgtgcacggttgacgatgtcaacgagttgtgcgatgtctgctctagagctatgggagatgatcaaaataaggccccaatcgcaccagcgtcacgaagcattcggttacagtgtgcagaagctaacaccagagtcctcaacgacgaaagagtctacatgctgttgcaggaaatgattttgaacgatgaatcgacacattgcgtggtatgttgggtttctaacccagcgaaattcatttatcacctcccagaggcatgcccacatcaagcagcctactgtttgaagtgccttggtgcccatcctgtacacgagtgtgagaatcatttaatttttgggtctcgctatccgtcgtgctttttctgtggcgttccaatacaccacgcgcattggaaaaacgatcttcattttggcagtaagccgggatcttcctgcaactctcgactgcgcgggaggatgatcccaggtgcatggagattttacgacgtttgtcgaactcgcgcatcatcccgtggaggaatagaaggtgaaattgccctcttgacaagacaggaatttgcacagtggcttgtgaaagtacccaccagtagctcgtttaccaacttgtgcattttgtgggcatacatacgagctctcttctccggttaatgagctgcaactactcgtcccacaactgtagcttagccacgagaagaccgtgccattgatttacctcacacccagtttttagataacgagagcatatgctttctagtccatattttcattcgacagatccaaatggggtcactaactgcattcagcgatgccatctgttccgccagcacggcgggcgccgttggctctagcctgaacagtgtcaatgctatattagaaaaaggagcgtgatcgatttagattgcgctgcaagctgctcgtccgtgtgagcgcaaagttatcaaagctaacggctccaaagcatctacgataagcatacgaagggtggtcgtagcaaattattcgacgtcgccggtaccaccaccatcacgctttgaggcgccaacgcgacctgcggtagtttgtaggcactgcatacatgaagtagaacggccaacaccgccgagaacggcggctatcgaaagcctgccgctgccagtatcgaccctcaggtctagattttgaaaatgtgtgaggtgtggggctcggatacttctcttctgttgttctcgtccagagtgaaaatgtgttgcgtgcagcctattggttgaacaaagttgttacatcgtgttctgaatttttgtctcaccactcgcatacatttgtggtacacactaaaatcctgtatgcagcacaacttccaacctttctaaagcagtactgcgtttttacagtacatgttatcagtatgaattcaaaaatagcatgtgttaattaataatctgagtccgactagttatacaggaataataatatttaccggtgggcatggctgctagatagccctcaggcgattatatagcgtgctcccacaaaccctcccgttaaatttagcacaaatagtaaaatcgacacaaccgttcgtgcatcgatacttacccgaaagtcaaatatgctcgtgtcgatctcaggcgcagctccgtcccaccaccaccggccgccaccccttgcttcagagtgattggccgtgtggttgacctatatgtaatcatttgaagggtaaagtcggccaaatccgctcgtgcttgtgcagctcgcacgcggcatgtaaacggaggtctggaccacgttgcatgtccggttatagcgtcatcaagaggcagcacacacgaagttgacacacactggatcgaagttgtatctcgcgtacggctctacaaggcatgcgctatcccacaggagggccgatattacttctttgggccgtagtccgcacaccgggtttgccggcaccatcacgaaaaagactaaacgcttacgagtcgcttccagaccgcggtgtactcaccgaccacgatgtagcgtcggataggttcatccaggcggacaggcactctgcggcaggggctgctggctgatggatgtgggctggagctgcacctgagatggccacctcggcaatctcgcgttacgaccgtgctagcgggcgcaccaacctccccgcccgtcgccaacacggttcgcgagggttaaacacgctggggacgcgtccgaggtggcggaggtaaccctggcgaccgtgtcagatatacccaatgaacctcgtgcggggtcattcgaccctggcgatgtcggtgggggggaatgaaggccacccgcggcgatcgcacgtcgcttccggacccaccaccagtggctacatgacccctaacgatggcaccaatggtacgttggccgtagattagagcgcaaacggtatcgccatggccggacgcatcccatgagccaccccacgcaagagaagggggttggtggttggatggatgtagtagagggggaagtaggtatgatgtgtgtgtaaatggtgtgtgcgaagtgggagagatgtaggttgatggtggatatgaggtgaacagtggataatgaggttgagaaatgagagtggaggtggtggagaaacctgggttgtaggatgaagaggaggtatgtggtggttgaatatagttatataaggtggaagtagatgtggattttgtaaatgagatggtgaggattaatggcgtatttaaaatgtaaaaaggatattgatgttgagaaaagagagtagataagttggataggatgggttgtaggatagagagggagaatatggtagttaaatagaggtagttgttgtggaatgtggtatgtaaaaagtgtatgagaaggaggatatgtgttgttggatggtggatataaaatgaaaagtgaaaatgaggttggaaaataatatggaggtggtggataatgttgaatatgtataaaataggtagtagttgaagtaagtaagttgatttagaaaaaaatgtgtgaaaaataagtgtctgattaggaacgatgtgtttgattgaaaatggtgaagtttaaaaagggatttggatagttgagagaaagaataagagtaaatagtggtaaaaatggtaaataatataaatgtagaaaaaaatggaggtaaaaatgataaatgtgaattatattaaaaggttaaaggaaagagtggttgaattaagtagaaaaatgtgagaggtaagtaaataggtagatgaatgaaagtaaatgggatgtaaaaagggaggtagataaaaggtttaaagaaaaaggaaagaaaaaaataggtgtaagtaaatatattgtgtaatggttagtaaaagaggaaaaaaagaagtgaaaagtaatgtgaaagtttaaggtttgtgaaaaaaggtctagggtttagggtttaggactatatattacgacccggatgaacgttcatcccagggtcctatatatattacgacccggatgaacgttcatcccagggtcctttagggtccttgggccggcttattttaggtgttcacgaccccaatatcatttatccagggtccttcgtgcccaaattagcttattttggttgattttttaatctaggctcggcgtctgaggttctctaataactgatagcgactaaaccctaaagctgatatttttgtagtaccgtacaaattatttaaaatatgttgatatcaaactattcttattggtcctctacaatattttactcgtcatatctaatcatttttaatggcgtgtaagacgctgtatttacatgtaaggcggctgccccgagaagcgagtttcgacacaccaggcgcatcttcgtcggcggagcgagcgcgcgtaggtaccgatcatcacgccgcgtaaccgcagctcggccgtacaaaggcgcgcgtccttggaggcgcgccgcatgtcaagcgcagagtcggcaaacttaatcccccccctctctaagcaatgttggaggtctatggtacagtatgtctgcataacgctttgcggtggcgacatggtggccgccagcagcgacctggtgggggccagcagcaacatagatggatacattctacacccgagcaagcgacgcggtgagcggagctgactgctgtgaactggtagacctgagggtcgatactggcagcggcagtctgccgatagccgccgttctcggcggtgttggccgttctactgcatgtatgcagtgcctacaaactaccgcaggtcgcgttggcgcctcaaagcgtgatggtggtggtaccggcgacgtcgaataatttgctacgaccacccttcgtatgcttatcgtagatgctttggagccgttagctttgataactttgcgctcacacggacgagcagcttgcagcgcaatctaaatcgatcacgctcctttttctaatatagcattgacactgttcaggctagagccaacggcgcccgccgtgctggcggaacagatggcatcgctgaatgcagttagtgaccccatttggatctgtcgaatgaaaatatggactagaaagcatatgctctcgttatctaaaaactgggtgtgaggtaaatcaatggcacggtcttctcgtggctaagctacagttgtgggacgagtagttgcagctcattaaccggagaagagagctcgtatgtatgcccacaaaatgcacaagttggtaaacgagctactggtgggtactttcacaagccactgtgcaaattcctgtcttgtcaagagggcaatttcaccttctattcctccacgggatgatgcgcgagttcgacaaacgtcgtaaaatctccatgcacctgggatcatcctcccgcgcagtcgagagttgcaggaagatcccggcttactgccaaaatgaagatcgtttttccaatgcgcgtggtgtattggaacgccacagaaaaagcacgacggatagcgagacccaaaaattaaatgattctcacactcgtgtacaggatgggcaccaaggcacttcaaacagtaggctgcttgatgtgggcatgcctctgggaggtgataaatgaattttgctgggttagaaacccaacataccacgcaatgtgtcgattcatcgttcaaaatcatttcctgcaacagcatgtagactctttcgtcgttgaggactctggtgttagcttctgcacactgtaaccgaatgcttcgtgacgctggtgcgattggggccttattttgatcatctcccatagctctagagcagacatcgcacaactcgttgacatcgtcaaccgtgcacggaaaacccgaaccgtccattgcctcttgtagtcgttgcctcctgcagcggattttatctaaaaggaatgcccgtagcgtactagggcttgatattcacccttattgctcgatgaccccactgtcaaatgcttcgaaaagcgctggaagtatgtttcacggtatatggtgacacattttgctggcttaccatcacgccccgaccgacctgtctcctgcgcgtaatcggtcaagctgtgggctagtccaaaatgtagtacggttcgaacgttcgggtaatccacaccctgacccaatccacacgtcgcaacaatatatgagcagttaggggacttccacaatgacaaattattcttgcgctcatcgaaagtcattccactatgataccgggcgaccacgttggacgtatggcgctctaaatagtctgcaatttcttcgaccttcggctttgtcaacgcaaagacaatgcctttgtcaggatgtgccataggaagtttcatcaatgatagacatgccttcatcatatctgtattcgataacaattccaccacttcgtaacgtattgacgctcggactgtcggcgttctcacagtgacgaaagggaagccaaaaattgtcatgaggtcattttcccaagtggagggaagagttgccgtcagtagtgtcttctggaccgaaatggacgataacacatagacgaatgacatgcacctgcggtaatcgatagccaagtgagcctcgtcaaaaaatattctgcctagtttgtcctgctcctgtagcgacagtaggaacgtccggaaattttgatgctccaagtacgttactcggacgaacaaaatagacggtagcgctgtgaaaggactcgtatcgtgttgatactcagagcactcgattcccaattgttctgtcttccgaagcgagtccaataaaagtgctaccaaaggcaccacaacaatgacaacacgcgtagaatccgaaaatgcggccaaataaaacagcaaggacttcccaccatttgtagggagtacaacgagtaaattagagacgctctgcaaaaccagtgtcgttgcaacacactgctctcttgaccgaaacgaagcagtctggtcacgaagaaatgatcggagcaaaatccgagctgacccaaagtgttccggaagtaagctgcttatagcttcgccaatagtaaaaaaagctgaacgttggtacgacaactgttattgggcgtccgtgcggagcaggttgattgaatcttgaaacttgctgcacgggtgacgtcggcgaacttttcctccttggcattatctcggattggtcacttggggcgtaacaattggtactggtcgagttaccaggtccgagaaggttatgccactggtgggaacaagaaacaaattcggccatatcatcgcgcgacataaaatacggatccgtggtagaacggctatacaacgtcgaagccgttgccggtgcatgagcggcttgaaaatcaaactgtcctgattcgatcttgttgatgtaatgttcttctccatgaatgcgatcgcgacgtgtctgtaagtccgagcagaaagttggttaccgcaacttacaaaattcatgttaattgcagcgcggcaacctttcccattcagtctgccctgccctgtagtgctgaagagatagtaaaacaaagcgtcaccttctccagaacggtccgaagtaaagcccccacgttgtagttgagtgaagaaaaattcttgtgccggacgcacaagggcagcatagatcacaaaatctaacgtcaactccggcggcaggaatcgcgcaattaagcgatgctgtcccgtacttccaaacgaagaatacgttacctgctggaacattattcttagtcttagaaaactgcagaatttcggattctgtcagagcatattcttctgacttctgaaggttactgtcagggaacacacgggtcttttccaccagaacgtttacagaactttcctctacatctctcaagcgcaggctagcttctgaaacacggttatcagaacaacgtacaacaacaggccatttcatctgatgcatctcgtctactgcaatcatactaccgatattcttcggtctgccgaaactagggcctagaacgaattcgacttcttttgtgaaactcctaccagagaaatccagtgagaaagatgtactatcatgagggcgaaaagaagttgtgataacagaggaggataccatatcgagcttgtcgtacttgtcaagaatactcggaaacttctcaaccttgtctctacacgtgcatttcttgaggtcgaatgcttcatctaagcccagtcttcaaagttttggttcttctccctctacatacccgcaaaaacatatatcagtgtccgacataatgattaacttgagtaattgattacaaggcattgtccataagcgcaagcacatgaaactcgtggagttttaaaaactatggctacggacgagcattcgatttcaccagcgtattcgccctgcgcttagcaaaagtattatgtattacgaaggagcaacggcaggggcaggagcattcaacccaaattgatgaccttattgaaaagttaatttcataaggcttcgtcggcaagccacctaattttagatagtttttatgtagatagaccaagcaatatacacgtgattaatgtgtgttaaataacgtaatatcaagttttggggtaagggtaaccacccaataaatacgaaggagcaaacagcaggcaaaaattccgcgtaatcgtgactgaagtaagcctaggagctgaagcgttacgttacgaactgaaaatttatgagtgcataacaaaagattcgcttattcatttagactcgggataacaagaaccttcgcttcaatgaacacgttcagagttcagcccgacacaacattcattcctactaggaaaaccaaaggggctgctggaaacgatatcaagtgtgcggagaccacttgtatcaaagcaggacagctaaaacgggtacctactaaatgcaggatgggaattcccgaaggacacgtaggacttcttggtggacgatctggccatacatccaaaggtatcgaagtgaagctgggctttatcgatgaagattacagaggatacgtagacgtcatggtcaagaacgacaccgaagaagacttcgtcattaacgagggagacagattcgctcaacttataatttgaaagatcttccaaggccctgtcgtagtagtggaagatctcgacgaaaccgagcgtggagaaggggggttcggtagcactgattctaactaggaatggaatgcaaatgtttaatccgtcgcaagtacagactgctgtttaaaactgtattcgattccattccgctgtcactagtctacagtcctgatcagtaccatcgacaatcccactttcacgtcaaaagtttcacgtattctgttgtagtatgtgacggacgtaggaatcatacaacaaggctctataatacgtgtgcaatgactaggaccgtagtcacattcgtcttgagtgaaagcagaaaacttatcgcctgttctaataaccatagaaagattagctgtaaccttggtaaatagggggtctagcctgacgtacctatgagtcattataacgacttcattaccgggccgtaagctaatgtcgaaacattcagtacagttgcttattttgagtattttataaccatcgactaaaatgtaaaagctatcgacttctcctggaatgatagttcgactgccgcaattagctagtacaacatttttcgatgacatggactcctgttaaactttcgcctttatggtacaggaccagttaaatcgcgatttatcatttacaaacttgttgaaccacgatactactatgtaacgtattgaacgaacatcgctgggccaacgcgcgcttgattgtttgcgatataaaagagtttcatctgtatcaataattacgggctctagaagcaatgaacagaatcgagcttaattccgaaacgattacttctactgcgtcgaatagcttttatctggtcaatgatgcaaacaaagaaagagctctaacttcagcggacggaagttccaatggagagtacacttttatgagagtaattataactatcatgttaatttcagtcgtagctctagttgtgttcatgggcattacctgcgccagcgatgcagctgggttcagaggatgtaataatgccagagatgagtcggatatcgaagctaactactcatcaaccgcgtaccctgagactccgccacaaccgttagttacgaagctctgaacgtagtgtataagtattggtgttctttaaaactgatacgacgtgagaaagatttcattgacaagattaccatgtcgacttacctgaagtttccgagtgacgtaaccgagaaatgcacgttctttcaaggtaacgtaaatgtcgtaccatccaatattatggctactgaatatctatggtcaggtagtgaagacggaactatagggatcaaagacttttggttactgaaaccaagaagagatatgcactcttcctcatgcgaagctaccaggaacattaacgtgagtgaaggcttgtactttcgaaggaacgtcgccatagcagtgattactccattattcgacaacataatgagtaagttgtataataacactatgaagtcgggctttagaccgcctataatcaatgcaagagagaatatgtatgagttaaccgaactatgggcagtatgtaaagaatctagcacaggttcattcaacgtgccttactacgatcatggatgtctggtaggcaataataatgctctacaactctgcaaacaatacaattggtcaccgatgggtgacgcgcgttttagggtgtccgtcgtcgaaagcttcgacaaagaaagtggaatagtagacataaattcggtacctgagatcatattcgctctaaccgaattcaaagtagacacttcacatctaaccttcactcgtggtatgaatgcgtacgtcaactataaccctaccattcgctatggtacctctctggaagtttacaatcacaccctcacttctcgtcattctttattctacaagactctgtgatcgtatgtcctcgtacaagcatctttaaaatggtcttgtaaatgtcgatatttcacagtaattagaactaagacatatactttaaaataatacaaaatgaacttcaacattcttctttctactctctacgctacgggactctacgtaggtgctgtttcagccaatgactggtccactctagtagccatgtttagcaagtcgtcatatgctggtgaatccgatgttttcggacttactgatgacctatcttgtcataatctcaagaacactaaccagaaactagcttcacttgcgtgtgggccctcaaaagattgtttagatatcaaacttttcacttctcctaactgccccgttgattcaaggcctgttctggtaggaggtgatacccaacatgttgagaacatccataatgagacagagactatcggattccaatcatttcgtatctccactactaactgtaacacttcaccacctcctattatgaatttgagggttaagctaagacaccttcttgaatccactcctgggttctccgatgatgcaaagtatgcaattaataacgtcctcgatgagagtttctatgaaggactgtgataagggccttgaacgtttacatgtgttcagttttaaaactttccgctttgagcgctaacgcttcttttttttttcttgttgaaaatgcataccatgaatcggaagttctcacttgattacgattaggtctgaagacctggtagtaagattctttttaccacgtccgtatttacgaaccaacgcgtgatactcaggaaagaaatcacagcagttatcgcgttcgtaacgcttcctgaactgagattcagcagagccaaaatcgttaggatcatcataattcacaagtgtacgcgagggatcttctacactttcgtcacttactcccttctccatagaatcgccccaaggataacgtatgcttattttgtccatataggtaacgaagtcgtagctaggatcgcggtcgcgtaaacctatgtacttgggtagaaacgcatttccctcgaaaccgtattgcagcagagactcaataacgtcccatctattgtaccgtaagtaattgatttatccacatcagcaaataagactaaaatatccaatgcattctcaggattgtagtacaatagactcgtcagtaaacgtactagatcgagtttctgcgaatgcatgccaatcttagctcttaaactccgcggcagcaagcggctcgacgacaagttcgatactacaactccgatttctctaagcgttatgtaacgacggtcatttaggagattaaataatatagtcgtttctattggaatgtaagggtcctcgagaacgtacctgagcatcttcgaactcatactgagtatatagcttaacaagcctccactacggtcgcaaagaaatatcggaagtcctctacagtacgctttgcgtatctccaatgccaacatcttggtgcaatcgtctatgttgctattcaggagtcgttccgcgtactttgtaatcatttctgtaacagaccgagtttcttcgatgtttaacatacggtgtgtcatcgattgagtgtttagcaagagtctagtatcatgtgggccacgatttttgacggactcgtttgtatcgcgtgaagtgcacataactttgaaataagacttggtagcctttatatggttttccatttcttccgatatacactcgaatagttcagagtctatcacccctttcatgaatgtttttatgtcgtccgtacttacaaaagaattcacggaccttgtcttggtggccttagtattatataagaactgtgacaattcttcgagattcgagagtactcccagagtaacggacgtaggcagtagcactactagaataacactcttgtagggtagcaggtactccttaggcagttctccaatcaaccccaatagctttatcgtgtagtggaggtagaagaagtcataagaggacgaaaggaaagtactatattgtagataatgtgggcgaacaagagtccgtattcttctcccctgttatacatttcactgtagtctttgaaatgggagtacatgtgtggtatacttctttcctcactgaatgctacgcggagaagttggatgttaagctctctgccatacgcttttttatgcacgacttccgctattcttctcagtttaatcgtagttattacttcgttacaggagctcgacgtgactttgggaaacgacgagaaagactggtccagaactattcctactgaaggaaacagcgacagctcgttgttaaagtcagaaatgccgcaaatattgtccaactggggtatgcgtatatagtaacgcgcagtttgactggtgctccagaattcagcacgtttcactacagtacatctccttactagttcctccattgtatttgcattaatatattcctatacgaaaaaaagatagacgacatgaacgcagttcaattgaatgaactcgaatctacgtagagacgttttaatactgtttatcatagcgtgtcaacttcactgaagatacatgaaacgaaattcacggggtcgcgtgacactaatttccccctagtaaagaatgtctcgcagcatggcttcattcgacagcgatcgaaaccattgatgaacgcaaatctcttgtctaaaaaccttatttttacattttttacgtccgcattaatttgagtctgatagaacacatcgaagaatacaggtttgctcctaggcactccgtctttcttaagaacggttctcttatatatcctccatactttgatagcctgttttcggagagcatcacagatcctactaaaaatccggttgatatcggtcaacagcacctctacgaggatgtcctccttagttagaagatcttccgtgttaacgagatgatacatagacgagctgcttaacgaaagtgaaccctgacttatcatctctgatacttcgtccatattcaatgcagcaaagaggttcttaacacccagcgttagatgcgagtcgattggttcgcaaacagtggtcagatatagaagttctacgtcagtaccacaaccgaatcctttatcgaacataatagctctaaataaaatgcttgtcttcagcgggatgctttccatactacgtctgatgtgtatagggtccagttcatcgttactgggttcagcagagtttttctcttcgaattcctcgaagtgtactctacgaggtctcatacttgatacaagagattgtgatgtcatttcgtaaatcaattgatttccataggttcaatatgaacactcatcacgaaggccgtgcgtcctgttcctcgagggtccttatgacgagcttctccagcaacgacacacttacaccaatctcttgcctactagagagccctgaccgaagaaaactgtgttcgactaaattctctatgataagcggaagaagctccatagagtctgtcaaagaacatgtttttcctctagaaacgccacgtgagatagtaggtcttgaactcaatgacgaaagcttcattactatacgctgtctcaagcaccaacactctttcggtagagcgtcttatcaagaacacttggaggatgtagattctgaaaacgaactcgtagtgatcgccctcaactcattcagatctcctatagctaaatcctgtaattatatctctgtcctctatcattgcaacaagtgtaataatgatacgtacattttgctaggtgaatactttggtagctacaaaaacttcttgctcaaattgcaagatctgatcacgatgcctaacgtatgctcgtgttgtaggcaaagaacgttattgaaaaaatacaaagaggtagacttatgtcctcgatgttacaggcacataccacacgaatacgttagacatattaaggacagagagtttcacgaggaagtacgaaacgctttcctgaagtcgttagaagaacacgggcgttttaaagtacgaaagagggaatacgtctacgatacgttttaatcatcggagcatacctcgattatagaaggtttacgcgaacgcttttcttcttttagtactctatgtagcaattgtaagcaatactgttacgaaatagataagattctctactcgaagtcctcgatcggtcgttgtattgaagtatataagctccttgatcgcatattgatctgtgaagcctgcaggtcatacctatgtgcaagcgtctcaaacggtcattgatagggattcgaggaacgagtgtagaaattttaaaacttcagtgatgtgcgtttatgtatagaactcaattgcatgtgctagggagtctggagtacagttgctgaacttcgtcttctcgatatactcttctaaggatctgttagttgggtgcttggatgagtgagaatctgtgtcttcatcgcctgtactgttcgacatctcattggtagcattctgtgacgctacagtgaagggaaaatcctgaagcatccaccttacgaagtctgcacgcaaattcatcagtatatagtccttaggcttgaccttacaaatgcacatcaccgtcaaaagcctgcatttgggacacttcgatacgaccaccattcctgattccacgcaatgttgtcgtatcatctcaaaacttcttactgatgcttgcgtaatgattgacatctcgccatctttaggaccacttcccatctttctgttaggcggtcgcccttctgtcacaggttcggagactaattgttgcttgttctcaacaaggtgtgctagaggataatactggcatattccgtagtagcacttagtgagtacaatccctttctcgtcggcatattctttcattttcatgaagtctttagcccgccaactcatcagagcgcggtatagaatgacgtatttcttattgaccaggaattgcttgtttccgttttcctcatctatatgtgtccaagttttgatgtcctcgtgttccgcgtcagaatcactactatcgcttttacgttcttcttctgtgtccatttcgctactgagtatatccctatctccgttcctagtcagtgttccatactcattctcgagtgctgatttttctgatttgcagtcgagacagcttccgcccaaccttctggttctggagggatctatttgattcagcacagactcccatcttctgagttctacagggaagaaacaaagaaggacatgtataacctttccagacgatgtttcgtaacctggtaccttgacgtaacacgaaaattctctcttaggcaaccgactctctctttcatatttatggtccttcggtgtaaaattcactacatcacgacctactatttccatagctctgaaagcttcatggagttgctccttagtttctctgttgactaatgaagtcatcggaaactgaacgtgaggatctattgttatgtctaggtccgcatcgtaacccataacgttatacctcctgtcaacgattaccgagttcgtgaacttttgtccataaggagaacttatcacccactcgcgatacatccgactttactagaagcgtaagtgatctgttcttattagagttgatggattctactatttttgtggtcgtgcctgcgattctacaccatctatgggtctctggacttatcttttctcccatagctacttctacaccttttttgatagggtgaaagacatatccttctcttgtgaatatcttttcatcactgaccttcgaagaaaacactaacgcatcagcgtaagtgaatttgttattcacgaacattgtaaccaatggagcttctggaatggtcatattctgaacgtcctctttcctatccattatttgtgacataagctttgttcttataatcgggtgatactcgcaaacaggccgcatgcaagaagcgttagaagcgaaaagtttagctatttcttgacatatcattgaagttcctagtagaattctcacggcgactgatgactctgagaagcttaccaacttagccagtgttctgcatttttcatggaacgaactcttaacgtacttactacccaactttctgataacttccctatcgcgaaacatgacattatcgagccagagctggtcataatgtagtttcttggtatccttaacgctttatggcctcataaggcatcctgctgctatagagataacgcaaactcttaactttcggaatacccataccgagggcgcgtcccatcctttttgcttcagtctcttatctagaatggaatctatatagtctttgtcggtttctacgacaacgccacagaagcatatcttccagtctctcttgccaccataacttctcttaactaccttcagggagacgtagtcttcgatactaattcgtccgtcactagcctgaacctaacgccgtgtacgagagacataatattgatagcgttagtactgatggtagtatactcagaagctatgaatcccttccaggacttccgaacttttcctatctcggtatcgtacttggctacttgatcgaatggcatgaaaactcgcatctccactaaagcgttatcgcacattaacgcaaataaagtaggtcggaaagcgccgctctctagtttagtgaactgttcttgatgatacacagaaccgttattaacagcctctgtacatgctttgaaagcaaggaagttgtagaattgaagcggttgtactctatctatctcattcctaacgctaatccagatttcgcatatggtcttgtggatgttattatcgtttcttatccactggtctttgcgtaacttcgacatacaacgatcccacgtcttgctgtttccggactttccattatgttccacgaacaaatagtagttcttgtttttcgagtctctgcaagcagtggttaatacaggtgcgtcataaatgttgtcgtagaatcgaggcactgcgaatgacttgtaattagaagctaggttcctgttatctacattcaacgtttcttcgtacgcgatgttgtcatcgcttaagtcacctcccatgagaaacaatgaagctgtcgccttcataaactgtctgttaggaaggttagtagtaactaacttaggagcctttaccttatcattccatccgggaagatgcttctccagtgtggcggaatctgcgaggaagtcttcctcctcattaaatcctaagagttcttggaactcagcgtccatcgtcaatgttgatcgattatttgctccccattttttaaaaaggcatgttgaattattattgatggttagactagacacggaatttaagtttcgaatttgaaactcataatactacggacaagatccttagctttgcttactatatctagtaagaggagagcttctgtgtctacaacgtactcgaacacagaaaccaacaaaataagtactcttgctcgtataacacggaggtattcgccttcgttgaccacgttagagttagcgatactgaataaaacttctaattctgtctgagataaggtatcgctttccatctcgtcgaccatgttctcgtcatcgacttcgtcgacgatgtcatatttgtcactttcgtaagcttcatatgccttgtcgatgacttcgtcgattgacactttactccccacgcacttcctgtactgagagtttctgtctattgtcaaactatcggaatacggattctctgcgtcgttagcgctgatataagatgctattttcatacactccgagaattcactgtaatacgcagcgatgtcgtctaacatacgttttcttacgatcagattgtcttcagtttttgatttgtactggttccagaaatgacgcattttcttgtaggtttcgatgaaatccagcgaatgacgaaagaaagatttgtttatgatagctattttatgaacacttggtgtactactggtgttgttgatacatgcaccctcgccgtttatatctaggcaccaaaatacactcagtatgaacgaaaatacgttaatgtaccgtacggtcattacttcggccctaacatcgagttcggtatgcgctcttatcatgttggttatggactatcacgcggagtttttttttgctcctgcttcttcgtatttacaatgcgcttactaacgttatatactccccgtacctctgctcttagaacactggatattatgagtacaggatcgtactatgatatataaactctctaaaattagggggcttgccgacgaagccttatgaaattaacttttcaataaggtcctttacttgttatggtttgctcctgccactgcctcttcgtaatgactatgatttgcgcgagcgcgaaatcggctcaactattttatcaggttcagtggcggcttttctgtttctgaactcagtagagtatttatatttctttaagagaaagatttcgcacttgtgttatccgagtgaagcttaagaactggtattaaatataactcagagacgacaatgtatcaacgcctgctatcgtttctcatttcgtcatcggtggctttattttctaacgcacatacctggattgattgcctggatctcaattacacgaaattatcagaagaatacggaagtttcatgcagtctacttcttctgttatgaatgtttgtaatggttatggagagggataccctggacggtacggaggaaccgacatagattccgtttatactcataggattgttcatgatgatgaagttctaggcgtggatgtatgtgatggaggtagactagagtcagaatactcgagaggacagaacgttttgaaagtggaacccggcatgcgtgtgtactatgggtatttgtcgaacggtcatgtaagcatagacgaactgggtcagaacacctaccacggagtttattggtctggttctagttcttatcgtattaattctacattgcaaatcgacaactctactctcatagacggaaaagtactaccattcgatgatggaagatgtggtggtaatgatcagataagcgttagtaatggctacacacgtatggattcaggggttccgtgtatcggttatttcgacgtacctgatgatactgactcaggaacttacgttttggtgtggtattggaggatgtacttgttgaactcagcaggtgaatatgattctgtgtgtaatgaaggcagaggtgccgctagttacagtacctgttttaagatggaagtcagtaacactaataacacgacaggtgttaaagatcagacactattctcgtacgaagactctttgcataactccaacgatagtagtgcgtgtaatctgttaccctacatgaactttgaaggcctgcatatttctaactctgaccgtttttaaggtaagccgtgacttcttggtactcagtgtctttttcttaaaaccgtaggagtttctatgataaactatcggtagcgactgaatgtgagaggtactccgtctctaaaagtatctttaacctgttttgtacgtatcctacccaattgtcttcaaccttgtcttctcctatacgacaagcagtgaagccttcgaatgttttgtttcccaagagcgttcctgtattaggtctccttatacaaaacgggcataacacgaaaagggagaagcgctcgttgctaatccagtcactattcattccgtatgtaacaaccttcatggattcaggaatcacgatttcctcctttgataggcttagtagccagttaccgcgtatggtacaggtgcaaggtctgttagacatatcgggtagagaagagagcttgcatctcatgaagtattctaccatagagctaggtattgttatattatatactcctcgtatgatatattccttaactacgtcgatagtaaccaaagcccttttgggtcctttataaaaagtcgatagacaccgtgagaatatctccgactttctttttcctgtggtatgtgacaaactcggacggctacagtgtttacattctcctatgaagtcatttctgctattaaggttgaataaggaatcgatttcaattaagtctgacgactcgagcggtatagtacttcttttatttgtgtctataccggaacaaaaatccagaaagatatctataggttttcttcgagctcttgacatccgagtctgcttttcgctcattgaatagcatttcgatataggaggtgaacccagtaaccttctcaaacaataagaacaccttattattgcatacgcaggttctccttcttcacagacgtctctcaatcctagtaagggatggctttcaaaattgcattcgcacgcgtcgttgatggtacaccgtggaccctctaaatcgtaaccgagcacggaacgttccaagtacctttttacttctttatcacaatcttcttttagcgagaggattctcatgttagctgtgataacgtacgcatcgttcgaatactcttctagtacaacgttcatctccttcgcggtactagggattttagttttaaatgaaatgctaagtacctgctgtagcatagtttccttctatcataatacgcacgattcgatcctcaatcgtgacggagctcttgttggtgactaggatatcataggcaaacttaacgtaccctttgtcatcatagatgtcattctcaggacaatatctacgggagattttcatgcttatatcgtccgataggaaggtctcatcgaggcttaactttatattcgtcttcagcctccatttcagtgttacgtttgcgtgacaggagccatgagcgggaagtcgtggcgtagaaacctggtaacgaatgagtgattgtggtacatatgagattagtttgtatggaaaatcagcacgtagtatctcgagtaagtgattggggctagtctcttgtaggttacatgccgacatatcttctaactcctctgtgatgcacacactcgttcctagaatgaacttcttcgtctctcttattggattgtagtatcaaatttttatacgaggtattgtaatctcggagtactgtgtacgttccttggtatgacactccttcgtttatacggtaaatagttatgatgcaagtcaagaaagaagagatattaagaggttcttcattatgacgagaactgtgactaaggatagcagacctttcatagtcaggtacacgcatggcaaaggccagccaaaagatggaatccttgaggtcaagtctatgaagtacaagatcgttaagaccaagtacatggagtactccctgtcaaagatgacaacaatgaactcactggatcacgttgtacgcttcatgacgactgctatggtcatttcataggcgagggtgacaaaatatcatttctaaatcgttttgtagacttcgaaagtactgtgctaagtttggaaacgagacttcatgagttatatatggtcaagaatgttatatcgagttccatgttctcgagagcagtttgtgatacactgactggaaagagtggtttgttaaggaagaagactcaagcagcatacccgcaatcttgtctgagatgcgtgacgactctacggccatggggagaacccatagacattgatatacctagttatatctacgagacattggtaaggataacgaatgacaaagctttttgacaacaagataaatgagttaaacctctactgtacgttttaaagaagtctcgagaggatatcctgcagttaccattactgctgcgttgtccaaaagaatatcacaagaaacactcgacaaggctaaaggcaagagtactacttcgttaggcgacgttttattcgagttcttgtgtaacaagccaccttaccattattggttgagaaagaaagacgtaacttctagaaaggtcaaagttgtaaccgaagtacgaaacattcctaaaggatatagagtctatgcaactactgacagagaatatgcattcgaaaatatcaaacacagggacttactcaagtgttttgccatgactgtggaaaacatctgtattattatgtcctatacgcctacagatgaagaagtaatatccttcgctacattggtctacatgtgtactctatctgattatagagaatcagtgacgagcatcgaacccaatcctctacctagcaaactgccattgaattacttcactgtagctaatttgtgtggagtccctatagcgagcaaagcattcgccaggtcagaatgtatgataagtactatgtcgcctcctgtagcagtagctttgggtaacctgactaggataattaatactcaatattctcgtaaggttctaaaccactgacgaattctctcatgagagtttcatccgaaagaacgcgaactaagaggtctttaaaattctcgaagaagaattccaacctcaaacggagtaagtatctttgctacaaaggtaccattgatagcgttttaagatcatgtgatgggaggactatggctatattagaaaagaattccacacccttcgtttactcgttttctttgtcggatacgatgaaagtctttagagtatgcaaagatagagtacctcagttcggggcactctacgtctatgacggttatgacaaagacaccgggtatttagtgaaagagagtggttttagcatgagagtgaaacgaagcagtaaaccactaagagctatagtgcgtttgaacgacatgagagaatttacaaggcgaatgggtgatgactcagttaccgacgatggtactactttcactgaaggagtttatttctcggatggtattagagctttcggtacgggtatcacagtcgagaggattagagacctatacaagaactacgtaggaagtatgaaaggcctcgaaaatatagtgcagtgtattcgtatagtgtcttcggtgattgaaaagaagtaaagtcccggtcagttttaaaaacggctgatcgtttaagcctagtcttcgtcagaaaagctgtcatccgatgaatccgggtcttcatccgactcgctattcgactctgtggaagaggaagaaagaggagacgaagaagaggaacagtgtgatgataatgacctagatgctatagatgattccgatttctgagaaccattaccgttgctatcgtcattatcactgccactatctgaaagagacgaatccgaggatacggacgactcgggtgacgataccgatgatgatagatccgacagtactgatgaaactgatgatgacgacgataacgaggatgacgatgacgatgaagataatgacgacttagatgaactagatgaactagacgaagcggaagacgacgaggaagatgaagactctgatgacacagaagatgactgtgacagatatccgtcagatgaacggtcttctccttccgtaaacaaggacgagtctacgatcgcgtgagtgaaaccgcttattgaagcaagtatctcatgacctctctccaagtcagttttgttccgaagttggtcatctcttcttcctttccttcttagactcttgctattccgatcaacaaagtttcgatctatttttttggaattctcggagttcttgagtatcctctcttttacgtacgtacctgcctttatgaggtttttgattttcttacgtgagtcgttgaagctttgtattgtatcacatgtactaccgagtataactttgagttgttctcccaagttgttcgcaatcacgacgatgacatcataacggagtcctatctcatgtaagagtttgcctttcttacctttgctctctttctccttcgcagatttggctttcttcttcacgccttttatatcatctttgagattcctagcagtttgtttcaaagttcctacactaggttcttcgaggtccacgtcgttatctatcttcagaggctgtgtcacagttgcattcactattccttcctgaaccggattgtacgttgaagtaagagagacgctcatggagtcggcccatgttttaatggagacagtaggcttaagtgcgtcctgcatggacttaaataactcttcaaaatcactctctggtttgttaagttccttgcttatccttttctgtacgctttcgagtttgggtatggtttctttaagtgcacggttagtctctctagtgagaattattcttgcgtttacttttgtcttcttttccatgtctaaaatagtctccgagaatacttcgaattcagttagcgtagatgcaatctctgcctcggataacgaacacctcaatatgagtctcagtaagtccctaggcgatccgaatgacctaagatcttttttgtcgtatgtcttcgaaacgagattagcttttctcctgtatttataccatgtattgtcttgtgacgcgtcgtgttcttcctcgattttaggacatacacgtatcaaagactcacttaactcggaaagcgtagccgatactgatggttcgtcaactaagattctcctagacagagctacaggatgcgagatgttcctgcgtgtaacctttatcacacgccttcttcgagaacctagttgagattttgcttctcctattacagcactagcttcagctcctatagaataaatgttgaactcagttatgccatatgccgaatgactgatttgtatactgatttgtatgagtagcttaaaaaaacgggagaagtgatttcgaacacgatgcctcgtctctgaactaggaaggatcttggtttgatatgaaatgacgttcaagtacgcaacgcctcttctcaactgtgcgaagctggtagctatattatcgctaagcattctgacctgcatctccgattctttcctattcttaaaggaagtctcacagagcaggaattgcgaaagcgtttgtacgctaggggtgtatccaccagaagtatgaggatcgaataagaacgctgacgcatacttcggaagttgtggtgagtcgtacggttcttgacttaaaactatagtgtctacatggtaaaaactcaataacgaaaggtaccgaaaacacgggaatctagatctaacttagactcttttctacaactagtggcgtagttaatgacgttctctttcataagtctcgtatacaatgcggatcctatggaattgctgtagaatgtgtgcacatgaactcggttatccatgattcaccgcttgcaattttaaaacgcataccgtgtatttatttacttgaatgcaaggcgaactttatgagcgattccatatgattcgaaagtattcgaacttggcgcatatactctctcgttcaatctcctagtcttcatcggattcgtcgccgtcatctccgctactctcttcgctatcgctttcaccgtcctcatctgcgttgtccgaaccatcgtcatcgctatcttcttcactgctttcgtcctctgatccggagctctcctcatcgctggattcattatcatccgactcactatcgtcatcactttcattctcgctttccgagtcttcgctgtcagaatcagaatcctcctctgagtcggagtcgtcctttttctttttggacttactctttttcttgttcttgtctttacgcttcttgctagagagctgcttaagaaccacagtagtcttcttggtaccagaattcgcgttatgctcgccgtaattggtaggaaacgacatcaatccagtgtccataaaatcaaagactataccgcggcagttacgatccagcgacccgaagttgaaattgcagcggagcgtaggccctcctgtgctaatcttcatgcccatgcgcagttgaatggaaaaagcctgagacttgctgacgttaggaatgatcttgtaaacatcattgacaccgatcttgcgctggacctccttccccttcgagctctgtcctaccacgcggaagagttcgttcatgcgagcgtagaccggattgccttttatgacagggagtttcacgtcataccacttgcccttgatgtcgttgatgacttcctcttttccagagggcaggttggatgtactgatcgaagtatacttcctccactcgttgggtttcatgttgtaacatgtctttacatagtccaagagaggactaatcattgattccacgtcttcatcaggaatcctaaaagcgaggtaatgaacgccatacttcagcttgccgccatttccgtacccctgcttggaccgcttctcaccctcgctattgtgcaaaggatctactagcgcgtggtagaaaggaatgtcttcggagacgactacgtgacccgtcctaacatttttagccaagacaagagccgtagacataggcgtaggtggacctttgttgtcaggtcttgcgaaaaggaagggatctcccggataaagcgtaatctgaccggttccgttagtccagttgtagtactgtaaaatccgttatcgtcgactacagggtcagtaagcgtcggaatagacagagagttctctttgcctttgagtagaaagcagtcaatcactgtgcgattctccaacgtgatcttgtgatggtccttgttctttgctacaactttcttgatcttgtcggacccaactttaccgcttcctgtaagtttgctccaaatatcgaagctttgaaccagcttttcttgaggagtccttttatttttctttttggacgtctccttctcgacttccctcttcttctcgacacttcgcttctcagtcttcacacgtctcttcttttcgtcatcatccgtctcttcggacttcctagaaggtctctttgctggtttgtctgacagcctctcgtctggctttttcgacgactttcctgaagactgacttgatgacttcccggacgattccttagaagattatttcatacttttctttttcttcctctcttctcctcctgcgttcacaccatcgaatcggatacgttctcctacgctgccaccctcttggattgtcttcaattgtttcgccattttcgtaagcttggacttctcttcgcgtgtcagactatcatgcttctcgtggaacttcagtatgtacttgataagggtcctcgtcttcttagtcagaacactggtctctccgctaattgatgcttcgtacaagtggtcgtaacttggaacaacgacttccactagagtatttctcagcaaatcgtgatcgatggtctccttcttccacgagtacaaagcgtcatcacatgcaatgatgaaatctccggtgtccttgggatacaacttggactcgtagtcacgatcattttcattttctcccccaacgccctcgagatcatcatcgtcagagtcgctatcgtcacgttcaccacctgcaactctgattccacgctctttcttcttaccagccttctcttcgatacctccaactgaattgctggtgccaacatcatcatcgttcttctcgtcatcaccttcttgggtatgtctctcgctcttctcgtccgacgtgggtgttttcgtaccgtctacctcgggatcttgcgtttcatcggcaaggagaaactcagcattagaattctttagaagagcttgggtttcttcctccgatttagtgggagtaatagaaggttgagtagaagtcatgagctcactttctctttcttcggacttaggcttgtcactttcagctttgtacaccgttgttttttcactcaagtccttaatgtcactctcgtcaactatcttcttcttatatattcgagtgggattcgtctgtaccgacgatgtattgtcacccaacttaccagcacgtttcttggccatatttgagaactcgcctgcgtcactcgtaacagacacgataccactagcttgcgtatgacttactgttataaatttttcttgagcatagcttgcttcaattttcaaaggcatacatcttaaggtccaggtttaagtctcgattgacatccgtgtttcatttgatcaggaatatcatcaggactttcccttctctcatgacttctcccgacgtgtcactcgtagtaagttgtatcttgttctctcctgaaccgatgttgtatatgtaagaaacgtaagtcgacggggtgcggaagaagtacactctgctgtcttctaccatgcccttaacattcgagatgtcgaagaccctgggagtgttgctgtccagttctaggttttcctcgcatatcaaactgaagtactcaacagaggaagttttacattctacacttacgttgatgtcgttcatgcgtcctgcgaaagtaccatctgcgatacacctctcgagcgagatcgctagtacggttcccttctccaaagtatactcgttcatacgtgagtcggaagaggataggtcgaagtcgaattccaaagaaagttcgtctccgttgtcgttcgtttctattcccgctataaatctggtgttttctaggaggaagaagccacctacgctgttgctagttcgaggaatgctgactttcaaaacattcgaaccgaacaccagatcaacgtcttcgcatagagtcaggtaagagaacgggaatagcgaggtttcaactttcattgtattcttattccaagtccgcggattactctgtttcccgatacagaagcaaccaggtttctatttatagatgctaaattgttcaacagttcctcgcccggtgccatacctgcgttaagcattaaaattctagttgcgacaagagcttcttctggactgagatcaagtttgaatgtagtacctcttgtaatgcttgcagctttacaaccaaacatagtcaatagcgcgttttctaaacaaacggggggttggtctaaggtcagtcttattccgacgcaattacgtataaaacacatacgatctttctcatgtatatcaggagacataatctctcttcctagtaaattacgagaagccttgataacacatgtacgtcgtgtgaaccacatactcttagtttgcttgttacaatcccacagagagttactcgccaggatcactgtgctgtctatggtgatattgttgttatctaccgatactgcgtctcctccaacggaagtcttccagaacgactcgtttatctgaccatcctctacggtaacatcgccgtaaactactattctgttacttgccatagccatgagatcctcattggttatcttcttgcgagtacctacgtaatctgtacttagaggatgggaacaacctctgaaagcttccagaatgttcgttataattgtactcttctctgtacctgcggtaccgtaaacgtagactatcctattatttgttttccagtccaaaatagaatttcccaggtaccacattaaacatctgagggagagagggtctaaggcagtgagcatagctctttctagaacccctaaacttaaaatctctgttttcttgaacaacaacttagatgaaattggttgtgtcaccaagttagacataagtccattgactgatccatgtactacactcctaaatgcctgcttacatatatcgaacttgacttttattgtgttctccttaggccttttttcgtaattgttgtattcggtgttatcaaattcggagtttccgttgactaagtatctcttatattctcttttcatccacttcttctgattatcgagccaatcttcactcatagtttctttcatgtcctttagacttgcaaacgcccaatatctagtgattgctgcttcgaaaaaagcagaacattttctattcgtgttcatcgaagggagtatgcaaagatcttggtacaactcatttataaaacgtatgcgtttatccgcgttcggtgaactactatctttacttctcttgattcctttcctgtgagtaaccttttttttcttttctttcattttgatattcgttataagttctacttcgtaccgttggatgcctacgcaaatgctcatcgacctcataagctcgactgtgcttgctacatagtttataatgcccagataaggagccgctgccctttcgtaggtagacggcacagaactcgccactatgttacctataagtttcatgcccgctaaactccaaagaggaacccagcatctgagcgagacatctgcaatgtaaacgatgcctaaaatacgaactatatatccgggtcctactagcttgtccttaagtttagactcattggtgctagagaccggttcgttgagataattgctgtaaaaagtttcaagtttgaattcatcctcgtacattatttcgtctttgttatagtaactcgttaggcgtatgtttataagtaccgaggagtacgtgaatctagtaaactcgggttatataccagtgtcatgtcgcgcgttatctcctgagttcccggatgaactctgtgtgtatgaagctctgggtatcgataaggacgacgaggacaaagcattacttacaataaagttcgtttaccccaaaccacgcagagttcttatcagatttctaaggctggacatctcgctagccatagaagaaaacggttttaagtttctaccaaagctggtgagtaagaaagagaagatggggaagttgggttacttgccttccactaaaagtacgcaaaacaaggaaagagctgctgcaatcttaggctatggtgcgtacttacatcctgatcatgaagtctcagtagaaatttaagatctctacctagcagggttggatatagaacagacctctcacatcagtggagaaggcagatttcctagtccttccgatcatattatctctatagctataagcactaacgcgaacgagtacttggtattttacacacagggatacatactaagagacaatatggaagactacaagaacgctcaataataaagccctgattttctgtgcgttcacaacggctacacctatgacatgaacgtgatcctgagtttactaccacctggatacgagagatatgtcaaatcctttaagttaggtgctactgccgcaggattcacgctcacgaacgttcatacagtcttcgtagatacttacttcttcctgaataaagtacacagatctgactacaaaaagcttagcctagacgttatagaagagacctatgacttgccatccaagaaacaatccccttccttttacgtcgatccgagcaattattcttacaattgcacaagaatggccgaatataacatacacgatgccaacctccattttatgatagcgatagctagcgggatgcttaaggaaataataagtatggtaaccgctttcaggtgccctattactgacgtaactcggtacattacagggggtatggtatttaacttgcttgtatatttctccttacttagcgagtacattctggattacagaatagacaggacgatgcttcctataactgggggtttcgtgggaactccctccagaggccgtcgagataacgttacggtggtagactttgcttcattgtaccctagtctcatgatatcgctgaatatttctaacgaaactttaagctgcaagttagacaagttaggtaatggttctagagaaggagcaatagactggcaaggaagcaacgtcttcacgttcataggaaagaacatttgtaagatatcgcaacgtaagaagtcggtagtatcaaaactcttgcttgaccttatatcccggagaaaagcagtaggaaagacaagctcactaggctgggctctcaaagtagctgctaatagcctttacggtgcattcggagctactacttcccacctctataactaccatgcggcttcttcaatcacttctgctggtaggtggatcattcatgtcgaaatggcgatagcacgaggtttaggacttaacgctgtttacggtgacacagactctctcttcctccagtctaacggaaaaatacatccccgatggatacattctagaaataatcccagggaaggcaggttcgaagggcgtctagaaaaagtcaagactcgcaagaacgagtttctagatattcaaagaaaaatacttgagttcctgccattttctaatgtgtcgttcgactgggagagagacttcaagtcaattattctgatagatcccaaaatttactacggtacatatatgaaggagggcatgttggtggagtaccctaaaggtcttgccttacaacgaaaagatcggaacgagatcaccaaaaaagtacggaggcttctgcttcaaaccatatcattagctccgagttctgaacccgaagttctcgagagtcatgagaaattcttcgttacgcctcttctgaacaggattagatcccaggatttgagtatagaggaatgtgtactagagactaaggaagacggtatagttcagtacgtatacaaagacgaggacgggaaattcgtaaccattaatgactttaatgacatgtcacttgcttccgaattcaagccctccgtagcctggatcgaggagtacattcacaacaatacagtaaacatactaaaggcatgtggtctagacagtctaactaccatatgtcaatgaagtttttaaaaacaggaggtcatacatagtactgctaaatagttcaattatcagttgaagtatcgctcacgtccgatagttcttcgaagtcctcttctatatcggaggtatctaccttagaaaccaaccgtttacgttcgacttttttttatctttcttgcttttcttgtcttttttatccttaactttcttgtctttctttaccttcttttctttttctctcatttctttccttttttgtctttctttctcttccttctttctctttcttgcttccttcttttcatctctctcttctttatccttcctactactctctctagatcctttcttttttctatcagagcttataacagtgtgtgcatgctcgtcgttgtcgcgttgaatagcagacctcttccgttcattggcgtcaaaaatcatgaatttttcatcataatccgcagatctgctaatgtcaagaaacctgtaagctaccttctgtttaatagattcagaattgaagcagcttgtatcgaatttcttgatctttacatcgaacccctctttgaagctaaggtaattcccatcaactgttttgcttcttatttctggatccaacgagtctactagtactttcagtgcatacggcaaacatgtagataccggaattagaacgtacctgtatatgttcctaagatgctgcatcaactcatcgcacgacaatatgtaccttatgactccgtcagctcctacgctactaggtggtgctttctttgactcccttgcaagcacgaaacgtaaaactgtggtagattccaagctacctttgagagatgacggattcttataatgactgactacagctttagtcaactcccatatacaaccattggagtaaactatgtatttctcgtactttttcaacagatggttagaaacatactggccacatttgtataacaacacctgtagacttcgatttaagtagttcctactgaaggaaaatgccgctttggttgtggcgggctctatcatggcgattggtttgggtcctcctcgtggggaactggatcatgagcccactttttaaacccattcttaaatactgaatatactgtggggacgaaagtctctgcttttaactagatagcaactttcagcagtggatgtctaggctcgcacatcgatgaagaacgctgcgaactgcgatacgtaatgcgaa
